(19) United States
(12) Patent Application Publication
(10) Pub. No.: US 2015/0337326 A1
(43) Pub. Date: Nov. 26, 2015

(54) PLANTS HAVING ENHANCED YIELD-RELATED TRAITS AND METHOD FOR MAKING THE SAME

(71) Applicant: BASF Plant Science Company GmbH, Ludwigshafen (DE)

(72) Inventors: Christophe Reuzeau, La Chapelle Gonaguet (FR); Steven Vandenabeele, Oudenaarde (BE); Valerie Frankard, Waterloo (BE)

(21) Appl. No.: 14/821,926

(22) Filed: Aug. 10, 2015

Related U.S. Application Data
(62) Division of application No. 13/805,857, filed on Dec. 20, 2012.
(60) Provisional application No. 61/358,028, filed on Jun. 24, 2010.
(60) Provisional application No. 61/364,824, filed on Jul. 16, 2010.
(60) Provisional application No. 61/411,972, filed on Nov. 10, 2010.

(51) Int. Cl. C12N 15/82; C07K 14/415

(52) U.S. Cl. CPC C12N 15/8261; C12N 15/8273; C12N 15/8271; C07K 14/415

(57) ABSTRACT

The present invention relates generally to the field of molecular biology and concerns a method for enhancing various economically important yield-related traits in plants. More specifically, the present invention concerns a method for enhancing yield-related traits in plants by modulating expression in a plant of a nucleic acid encoding an OsRSZ33 RRM polypeptide, a growth-related protein (GRP) having at least 25% amino acid sequence identity to SEQ ID NO: 251, or a ZPR polypeptide. The present invention also concerns plants having modulated expression of a nucleic acid encoding an OsRSZ33 RRM polypeptide, a growth-related polypeptide as defined herein, or a ZPR polypeptide, which plants have enhanced yield-related traits relative to control plants. The invention also provides unknown OsRSZ33 RRM-encoding nucleic acids, GRP-encoding nucleic acids, or a ZPR polypeptide, and constructs comprising the same, useful in performing the methods of the invention.

### RELATED APPLICATIONS

[0001] This application is a divisional of patent application Ser. No. 13/805,857 filed Dec. 20, 2012, which is a national stage application (under 35 U.S.C. §371) of PCT/IB2011/052699, filed Jun. 21, 2011, which claims benefit of U.S. Provisional Application No. 61/358,028, filed Jun. 24, 2010, U.S. Provisional Application No. 61/364,824, filed Jul. 16, 2010, and U.S. Provisional Application No. 61/411,972, filed Nov. 10, 2010. The entire content of each aforementioned application is hereby incorporated by reference in its entirety.

### SUBMISSION OF SEQUENCE LISTING

[0002] The Sequence Listing associated with this application is filed in electronic format via EFS-Web and hereby incorporated by reference into the specification in its entirety. The name of the text file containing the Sequence Listing is Sequence_Listing_{—}074053_{—}0054_{—}01. The size of the text file is 969 KB, and the text file was created on Aug. 10, 2015.

[0003] The present invention relates generally to the field of molecular biology and concerns a method for enhancing various economically important yield-related traits in plants by modulating expression in a plant of a nucleic acid encoding i) an OsRSZ33 RRM polypeptide, an orthologue of atRSZ33 or ii) a growth-related protein (GRP) having at least 25% amino acid sequence identity to SEQ ID NO: 251 or iii) a LITTLE ZIPPER (ZPR) polypeptide. The present invention also concerns plants having modulated expression of a nucleic acid encoding an OsRSZ33 RRM polypeptide or a growth-related protein (GRP) having at least 25% amino acid sequence identity to SEQ ID NO: 251 or a ZPR polypeptide, which plants have enhanced yield-related traits relative to corresponding wild type plants or other control plants. The invention also provides constructs useful in the methods of the invention or hitherto unknown GRP-encoding nucleic acids or ZPR-encoding nucleic acids, and constructs comprising the same, useful in performing the methods of the invention.

[0004] The ever-increasing world population and the dwindling supply of arable land available for agriculture fuels research towards increasing the efficiency of agriculture. Conventional means for crop and horticultural improvements utilise selective breeding techniques to identify plants having desirable characteristics. However, such selective breeding techniques have several drawbacks, namely that these techniques are typically labour intensive and result in plants that often contain heterogeneous genetic components that may not always result in the desirable trait being passed on from parent plants. Advances in molecular biology have allowed mankind to modify the germplasm of animals and plants. Genetic engineering of plants entails the isolation and manipulation of genetic material (typically in the form of DNA or RNA) and the subsequent introduction of that genetic material into a plant. Such technology has the capacity to deliver crops or plants having various improved economic, agronomic or horticultural traits.

[0005] A trait of particular economic interest is increased yield. Yield is normally defined as the measurable produce of economic value from a crop. This may be defined in terms of quantity and/or quality. Yield is directly dependent on several factors, for example, the number and size of the organs, plant architecture (for example, the number of branches), seed production, leaf senescence and more. Root development, nutrient uptake, stress tolerance and early vigour may also be important factors in determining yield. Optimizing the abovementioned factors may therefore contribute to increasing crop yield.

[0006] Seed yield is a particularly important trait, since the seeds of many plants are important for human and animal nutrition. Crops such as corn, rice, wheat, canola and soybean account for over half the total human caloric intake, whether through direct consumption of the seeds themselves or through consumption of meat products raised on processed seeds. They are also a source of sugars, oils and many kinds of metabolites used in industrial processes. Seeds contain an embryo (the source of new shoots and roots) and an endosperm (the source of nutrients for embryo growth during germination and during early growth of seedlings). The development of a seed involves many genes, and requires the transfer of metabolites from the roots, leaves and stems into the growing seed. The endosperm, in particular, assimilates the metabolic precursors of carbohydrates, oils and proteins and synthesizes them into storage macromolecules to fill out the grain.

[0007] Another important trait for many crops is early vigour. Improving early vigour is an important objective of modern rice breeding programs in both temperate and tropical rice cultivars. Long roots are important for proper soil anchorage in water-seeded rice. Where rice is sown directly into flooded fields, and where plants must emerge rapidly through water, longer shoots are associated with vigour. Where drill-seeding is practiced, longer mesocotyls and coleoptiles are important for good seedling emergence. The ability to engineer early vigour into plants would be of great importance in agriculture. For example, poor early vigour has been a limitation to the introduction of maize (Zea mays L.) hybrids based on Corn Belt germplasm in the European Atlantic.

[0008] A further important trait is that of improved abiotic stress tolerance. Abiotic stress is a primary cause of crop loss worldwide, reducing average yields for most major crop plants by more than 50% (Wang et al., Planta 218, 1-14, 2003). Abiotic stresses may be caused by drought, salinity, extremes of temperature, chemical toxicity and oxidative stress. The ability to improve plant tolerance to abiotic stress would be of great economic advantage to farmers worldwide and would allow for the cultivation of crops during adverse conditions and in territories where cultivation of crops may not otherwise be possible.

[0009] Crop yield may therefore be increased by optimising one of the above-mentioned factors.

[0010] Depending on the end use, the modification of certain yield traits may be favoured over others. For example for applications such as forage or wood production, or bio-fuel resource, an increase in the vegetative parts of a plant may be desirable, and for applications such as flour, starch or oil production, an increase in seed parameters may be particularly desirable. Even amongst the seed parameters, some may be favoured over others, depending on the application. Various mechanisms may contribute to increasing seed yield, whether that is in the form of increased seed size or increased seed number.

[0011] One approach to increasing yield (seed yield and/or biomass) in plants may be through modification of the inherent growth mechanisms of a plant, such as the cell cycle or various signalling pathways involved in plant growth or in defense mechanisms.

[0012] It has now been found that various yield-related traits may be improved in plants by modulating expression in a plant of a nucleic acid encoding an OsRSZ33 RRM polypeptide as defined herein or a growth-related polypeptide as defined herein or a ZPR polypeptide as defined herein.

### BACKGROUND

[0013] Pre-mRNA processing to mRNA requires, in addition to the spliceosome, the activity of a large number of proteins. Many of these proteins, known as SR proteins and SR-related proteins, contain so called RS-domains rich in alternating Arg and Ser residues. Some of these proteins are involved in RNA splicing, others are needed for 3′ end formation of mRNA or for export. Splicing (and alternative splicing) is a common step in the formation in mRNA and allows regulation of gene expression by selection of alternative splice sites in the pre-mRNA, thereby generating multiple protein isoforms or variants. An overview of SR proteins and their activities in plants is given in Barta et al. (Curr. Top. Microbiol. Immunol. 326, 83-102, 2008).

[0014] Some of the SR proteins are unique to plants, for example several of the 19 SR proteins encoded in the Arabidopsis genome have no orthologues in metazoan (Kalyna et al., Nucleic Acids Res. 34, 4395-4405, 2006). One of these, atRSZ33, acts as a splicing factor for atSRp30 and atSRp34/SR1 (Kalyna et al., Mol Biol. Cell, 14, 3565-3577, 2003). atRSZ33 comprises an RNA recognition motif (RRM), two zinc knuckles embedded in a basic RS region and an acidic C-terminal domain (Lopato et al., J. Biol. Chem. 277, 39989-39998, 2002). It was postulated that its main activity is in spliceosome assembly, and that both zinc knuckles and part of the RS and the RRM domain are needed for protein-protein interaction (Lopato et al. 2002).

[0015] Expression of atRSZ33 cDNA under control of the 35S promoter in Arabidopsis caused pleiotropic changes in plant development resulting in increased cell expansion and changed polarisation of cell elongation and division resulting in abnormal and sterile plants.

[0016] Expression of rice RS proteins in rice reportedly did not influence plant growth in general (Isshiki et al., Plant Cell 18, 146-148, 2006).

[0017] In accordance with the present invention, it has been found that modulating the expression of genes that are involved in stress responses in plants may lead to plants having enhanced yield-related traits, in particular plants having increased yield such as but not limited to increased seed yield and increased biomass, relative to control plants.

[0018] Stress conditions trigger a wide range of plant responses, including altered gene expression and changes of cellular metabolism. A stress response is usually initiated when plants recognizes stress at the cellular level. Stress recognition activates signal transduction pathways that transmit information within the individual cell and throughout the plant.

[0019] Chakrabarty et al. (2009, Chemosphere 74: 688-702) for instance describe comparative transcriptome analysis of arsenate and arsenite stresses in rice seedlings. The authors studied the effect of arsenic (As) exposure on genome-wide expression was examined in rice (Oryza sativa L., ssp. Indica). A group of defense and stress-responsive genes, transporters, heat-shock proteins, metallothioneins, sulfate-metabolizing proteins, and regulatory genes showed differential expression in rice seedlings challenged with arsenate (AsV) and arsenite (AsIII). AsV stress led to upregulation or downregulation of an additional set of genes in comparison to AsIII.

[0020] Reactive oxygen species (ROS) are key players in the regulation of plant development, stress responses, and programmed cell death. Previous studies indicated that depending on the type of ROS (hydrogen peroxide, superoxide, or singlet oxygen) or its subcellular production site (plastidic, cytosolic, peroxisomal, or apoplastic), a different physiological, biochemical, and molecular response is provoked. Plants are especially susceptible to oxidative damage, since the production of ROS is increased during stresses imposed by the environment such as extremes of temperature, suboptimal water availability and pollution. Plants have, therefore, evolved a dynamic network of antioxidant defenses that serve to reduce the accumulation of ROS, to detoxify ROS, and to detoxify and repair oxidized molecules. Studies on the role of ROS signalling in stress responses and plant responses thereon are ongoing.

[0021] For instance, Gadjev et al. (2006, Plant Physiology, 141:436-445) used transcriptome data generated from ROS-related microarray experiments to assess the specificity of ROS-driven transcript expression. Data sets obtained by exogenous application of oxidative stress-causing agents (methyl viologen, Alternaria alternate toxin, 3-aminotriazole, and ozone) and from a mutant (fluorescent) and transgenic plants, in which the activity of an individual antioxidant enzyme was perturbed (catalase, cytosolic ascorbate peroxidase, and copper/zinc superoxide dismutase), were compared. In total, the abundance of nearly 26,000 transcripts of Arabidopsis (Arabidopsis thaliana) was monitored in response to different ROS. Marker transcripts that were specifically regulated by hydrogen peroxide, superoxide, or singlet oxygen, several transcripts were identified as general oxidative stress response markers because their steady-state levels were at least 5-fold elevated in most experiments. For instance, one transcript, encoding a protein of unknown function (At2g21640), was at least 5-fold elevated in all experiments, except in the KO-Apx1 plants. The authors also inferred new candidate regulatory transcripts that could be responsible for orchestrating the specific transcriptomic signatures triggered by different ROS.

[0022] Sweetlove et al. (2002; Plant Journal, 32:891:904) have studied the impact of oxidative stress on Arabidopsis mitochondria and conclude that differences between stress treatments have implications for the nature of the integration of stress responses between plant cell compartments. The authors present a survey of the impact of oxidative stress on the protein composition and function of plant mitochondria. They showed that stress has a significant effect on the mitochondrial proteome leading to the degradation of a number of key proteins. Using 2D gel electrophoresis in combination with MS/MS the authors were also able to identify new, inducible components of the mitochondrial antioxidant system, amongst which stress-responsive genes, At2g21640. They also demonstrated that mitochondrial function is negatively affected by oxidative stress in a manner that will have implications across the cell, and that plant mitochondria utilize a number of antioxidant enzymes to scavenge and detoxify ROS to ameliorate this oxidative damage.

[0023] Ho et al. (Plant Physiology, 147:1858-1873, 2008) have studied transcript abundance and promoters of genes encoding mitochondrial proteins to identify signaling pathways that regulate stress-induced gene expression. In their study they used Arabidopsis alternative oxidase AOX1a, external NADP H-dehydrogenase NDB2, and two additional highly stress-responsive genes, At2g21640 and BCS1. Analysis of transcript abundance of these genes in a variety of defense signaling mutants confirmed that BCS1 expression is regulated in a different manner compared to AOX1a, NDB2, and At2g21640. According to the authors, at least three distinctive pathways regulate mitochondrial stress response at a transcriptional level, an SA-dependent pathway represented by BCS1, a second pathway that represents a convergence point for signals generated by H(2)O(2) and rotenone on multiple CAREs, and a third pathway that acts via EDS1 and PAD4 regulating only AOX1a.

[0024] In Arabidopsis, according to Jun et al. (Plant Signaling & Behavior 3:9, 615-617; 2008) ZPR proteins were identified by two independent groups as a group of genes encoding proteins with small molecular sizes that are composed of 67-100 residues in Arabidopsis (Wenkel et al. The Plant Cell, Vol. 19: 3379-3390, 2007; and, Kim et al. The Plant Cell, Vol. 20: 920-933, 2008).

[0025] Wenkel et al. (2007) described this small family of plant-specific LITTLE ZIPPER (ZPR) genes that encode small proteins (67 to 105 amino acids long) and that include a stretch of leucine zipper motifs. This stretch of leucine zipper is approximately six heptads in length and is similar to the leucine zipper found in the class III homeodomain-leucine zipper (HD-ZIPIII) proteins. Class III homeodomain-leucine zipper (HD-ZIPIII) proteins are conserved plant proteins that act as potent regulators of ad/abaxial polarity in Arabidosis. HD-ZIPIII protein activity promotes the development of adaxial leaf fates and meristem formation; in its absence, lower abaxial leaf fates develop and meristems fail to form.

[0026] Wenkel et al. (2007) reported that LITTLE ZIPPER (ZPR) genes are transcriptionally upregulated by HD-ZIPIII activity. Wenkel et al. (2007) further described that the structural features of the ZPR proteins, and their induction by HD-ZIPIII activity, suggest a model for the action of the ZPR genes as part of a negative feedback loop on HD-ZIPIII function. In the regulatory module proposed by Wenkel et al. (2007), HD-ZIPIII proteins activate transcription of the ZPR genes. The ZPR proteins then form heterodimers with the HD-ZIPIII proteins, preventing or altering their DNA binding.

[0027] Kim et al. (2008) demonstrated that a small ZIP protein, ZPR3, and its functionally redundant homolog, ZPR4, negatively regulate the HD-ZIP III activity in Shoot apical meristem (SAM) development. ZPR3 directly interacts with PHABULOSA (PHB) and other HD-ZIP III proteins via the ZIP motifs and forms nonfunctional heterodimers. In view thereof, Kim et al. (2008) proposed that HD-ZIPIII activity in regulating SAM is modulated by, among other things, a feedback loop involving the competitive inhibitors ZPR3 and ZPR4.

[0028] Transgenic Arabidopsis plants overexpressing ZPR genes have been described in literature (see e.g. Wenkel et al. 2007; Kim et al. 2008). For instance, Wenkel et al. (2007) described transgenic Arabidopsis plants that overexpress the Arabidopsis ZPR1 gene or the Arabidopsis ZPR3 gene. The authors of this paper showed that when overexpressed, the ZPR1 and ZPR3 proteins cause abaxialization consistent with inhibition of HD-ZIPIII function. ZPR3 causes a stronger phenotype, in some cases resulting in the production of a rod-shaped leaf that terminates the shoot apical meristem.

[0029] Phylogenetic analysis revealed that ZPR proteins can be classified into two distinct groups: one including ZPR1 and ZPR2 and the other including ZPR3 and ZPR4 (Wenkel et al., 2007). The two groups are distinct in their molecular sizes and the location of the ZIP motifs within the proteins. ZPR1 and ZPR2 (93 and 105 residues, respectively) are larger than ZPR3 and ZPR4 (67 and 72 residues, respectively) mainly because ZPR1 and ZPR2 have N-terminal extensions. Kim et al. (2008) described that this structural distinction, together with the phenotypes of the mutant and transgenic Arabidopsis plants with altered ZPR expressions (Wenkel et al., 2007; Kim et al. 2008), support the idea that, whereas ZPR3 and ZPR4 play a role principally in the SAM development, ZPR1 and ZPR2 are more closely linked to the patterning of leaf polarity.

### SUMMARY

[0030] Surprisingly, it has now been found that modulating expression of a nucleic acid encoding OsRSZ33 RRM, an orthologue of atRSZ33 (Arabidopsis thaliana RS-containing Zinc knuckle protein with a molecular mass of 33 kDa, Lopato et al. 2002) and also known as RSZ36 (Isshiki et al., 2006) or a growth-related polypeptide (GRP) or a ZPR polypeptide as defined herein, gives plants having enhanced yield-related traits, in particular increased yield relative to control plants, such as but not limited to increased seed yield and increased biomass relative to control plants.

[0031] According one embodiment, there is provided a method for improving yield-related traits in plants relative to control plants, in particular yield, and more particularly seed yield in plants relative to control plants, comprising modulating expression in a plant of a nucleic acid encoding an OsRSZ33 RRM polypeptide or a growth-related polypeptide (GRP) or ZPR polypeptide as defined herein.

[0032] The section captions and headings in this specification are for convenience and reference purpose only and should not affect in any way the meaning or interpretation of this specification.

### DEFINITIONS

[0033] The following definitions will be used throughout the present specification.

### Polypeptide(s)/Protein(s)

[0034] The terms “polypeptide” and “protein” are used interchangeably herein and refer to amino acids in a polymeric form of any length, linked together by peptide bonds.

### Polynucleotide(s)/Nucleic Acid(s)/Nucleic Acid Sequence(s)/Nucleotide Sequence(s)

[0035] The terms “polynucleotide(s)”, “nucleic acid sequence(s)”, “nucleotide sequence(s)”, “nucleic acid(s)”, “nucleic acid molecule” are used interchangeably herein and refer to nucleotides, either ribonucleotides or deoxyribonucleotides or a combination of both, in a polymeric unbranched form of any length.

### Homologue(s)

[0036] “Homologues” of a protein encompass peptides, oligopeptides, polypeptides, proteins and enzymes having amino acid substitutions, deletions and/or insertions relative to the unmodified protein in question and having similar biological and functional activity as the unmodified protein from which they are derived.

[0037] A deletion refers to removal of one or more amino acids from a protein.

[0038] An insertion refers to one or more amino acid residues being introduced into a predetermined site in a protein. Insertions may comprise N-terminal and/or C-terminal fusions as well as intra-sequence insertions of single or multiple amino acids. Generally, insertions within the amino acid sequence will be smaller than N- or C-terminal fusions, of the order of about 1 to 10 residues. Examples of N- or C-terminal fusion proteins or peptides include the binding domain or activation domain of a transcriptional activator as used in the yeast two-hybrid system, phage coat proteins, (histidine)-6-tag, glutathione S-transferase-tag, protein A, maltose-binding protein, dihydrofolate reductase, Tag•100 epitope, c-myc epitope, FLAG®-epitope, lacZ, CMP (calmodulin-binding peptide), HA epitope, protein C epitope and VSV epitope.

[0039] A substitution refers to replacement of amino acids of the protein with other amino acids having similar properties (such as similar hydrophobicity, hydrophilicity, antigenicity, propensity to form or break α-helical structures or β-sheet structures). Amino acid substitutions are typically of single residues, but may be clustered depending upon functional constraints placed upon the polypeptide and may range from 1 to 10 amino acids; insertions will usually be of the order of about 1 to 10 amino acid residues. The amino acid substitutions are preferably conservative amino acid substitutions. Conservative substitution tables are well known in the art (see for example Creighton (1984) Proteins. W.H. Freeman and Company (Eds) and Table 1 below).

TABLE 1
Examples of conserved amino acid substitutions

| Residue | Conservative Substitutions |
|---|---|
| Ala | Ser |
| Arg | Lys |
| Asn | Gln; His |
| Asp | Glu |
| Gln | Asn |
| Cys | Ser |
| Glu | Asp |
| Gly | Pro |
| His | Asn; Gln |
| Ile | Leu, Val |
| Leu | Ile; Val |
| Lys | Arg; Gln |
| Met | Leu; Ile |
| Phe | Met; Leu; Tyr |
| Ser | Thr; Gly |
| Thr | Ser; Val |
| Trp | Tyr |
| Tyr | Trp; Phe |
| Val | Ile; Leu |

[0040] Amino acid substitutions, deletions and/or insertions may readily be made using peptide synthetic techniques well known in the art, such as solid phase peptide synthesis and the like, or by recombinant DNA manipulation. Methods for the manipulation of DNA sequences to produce substitution, insertion or deletion variants of a protein are well known in the art. For example, techniques for making substitution mutations at predetermined sites in DNA are well known to those skilled in the art and include M13 mutagenesis, T7-Gen in vitro mutagenesis (USB, Cleveland, Ohio), QuickChange Site Directed mutagenesis (Stratagene, San Diego, Calif.), PCR-mediated site-directed mutagenesis or other site-directed mutagenesis protocols.

### Derivatives

[0041] “Derivatives” include peptides, oligopeptides, polypeptides which may, compared to the amino acid sequence of the naturally-occurring form of the protein, such as the protein of interest, comprise substitutions of amino acids with non-naturally occurring amino acid residues, or additions of non-naturally occurring amino acid residues. “Derivatives” of a protein also encompass peptides, oligopeptides, polypeptides which comprise naturally occurring altered (glycosylated, acylated, prenylated, phosphorylated, myristoylated, sulphated etc.) or non-naturally altered amino acid residues compared to the amino acid sequence of a naturally-occurring form of the polypeptide. A derivative may also comprise one or more non-amino acid substituents or additions compared to the amino acid sequence from which it is derived, for example a reporter molecule or other ligand, covalently or non-covalently bound to the amino acid sequence, such as a reporter molecule which is bound to facilitate its detection, and non-naturally occurring amino acid residues relative to the amino acid sequence of a naturally-occurring protein. Furthermore, “derivatives” also include fusions of the naturally-occurring form of the protein with tagging peptides such as FLAG, HIS6 or thioredoxin (for a review of tagging peptides, see Terpe, Appl. Microbiol. Biotechnol. 60, 523-533, 2003).

### Orthologue(s)/Paralogue(s)

[0042] Orthologues and paralogues encompass evolutionary concepts used to describe the ancestral relationships of genes. Paralogues are genes within the same species that have originated through duplication of an ancestral gene; orthologues are genes from different organisms that have originated through speciation, and are also derived from a common ancestral gene.

### Domain, Motif/Consensus Sequence/Signature

[0043] The term “domain” refers to a set of amino acids conserved at specific positions along an alignment of sequences of evolutionarily related proteins. While amino acids at other positions can vary between homologues, amino acids that are highly conserved at specific positions indicate amino acids that are likely essential in the structure, stability or function of a protein. Identified by their high degree of conservation in aligned sequences of a family of protein homologues, they can be used as identifiers to determine if any polypeptide in question belongs to a previously identified polypeptide family.

[0044] The term “motif” or “consensus sequence” or “signature” refers to a short conserved region in the sequence of evolutionarily related proteins. Motifs are frequently highly conserved parts of domains, but may also include only part of the domain, or be located outside of conserved domain (if all of the amino acids of the motif fall outside of a defined domain).

[0045] Specialist databases exist for the identification of domains, for example, SMART (Schultz et al. (1998) Proc. Natl. Acad. Sci. USA 95, 5857-5864; Letunic et al. (2002) Nucleic Acids Res 30, 242-244), InterPro (Mulder et al., (2003) Nucl. Acids. Res. 31, 315-318), Prosite (Bucher and Bairoch (1994), A generalized profile syntax for biomolecular sequences motifs and its function in automatic sequence interpretation. (In) ISMB-94; Proceedings 2nd International Conference on Intelligent Systems for Molecular Biology. Altman R., Brutlag D., Karp P., Lathrop R., Searls D., Eds., pp 53-61, AAAI Press, Menlo Park; Hulo et al., Nucl. Acids. Res. 32:D134-D137, (2004)), or Pfam (Bateman et al., Nucleic Acids Research 30(1): 276-280 (2002)). A set of tools for in silico analysis of protein sequences is available on the ExPASy proteomics server (Swiss Institute of Bioinformatics (Gasteiger et al., ExPASy: the proteomics server for in-depth protein knowledge and analysis, Nucleic Acids Res. 31:3784-3788 (2003)). Domains or motifs may also be identified using routine techniques, such as by sequence alignment.

[0046] Methods for the alignment of sequences for comparison are well known in the art, such methods include GAP, BESTFIT, BLAST, FASTA and TFASTA. GAP uses the algorithm of Needleman and Wunsch ((1970) J Mol Biol 48: 443-453) to find the global (i.e. spanning the complete sequences) alignment of two sequences that maximizes the number of matches and minimizes the number of gaps. The BLAST algorithm (Altschul et al. (1990) J Mol Biol 215: 403-10) calculates percent sequence identity and performs a statistical analysis of the similarity between the two sequences. The software for performing BLAST analysis is publicly available through the National Centre for Biotechnology Information (NCBI). Homologues may readily be identified using, for example, the ClustalW multiple sequence alignment algorithm (version 1.83), with the default pairwise alignment parameters, and a scoring method in percentage. Global percentages of similarity and identity may also be determined using one of the methods available in the MatGAT software package (Campanella et al., BMC Bioinformatics. 2003 Jul. 10; 4:29. MatGAT: an application that generates similarity/identity matrices using protein or DNA sequences.). Minor manual editing may be performed to optimise alignment between conserved motifs, as would be apparent to a person skilled in the art. Furthermore, instead of using full-length sequences for the identification of homologues, specific domains may also be used. The sequence identity values may be determined over the entire nucleic acid or amino acid sequence or over selected domains or conserved motif(s), using the programs mentioned above using the default parameters. For local alignments, the Smith-Waterman algorithm is particularly useful (Smith T F, Waterman M S (1981) J. Mol. Biol 147(1); 195-7).

### Reciprocal BLAST

[0047] Typically, this involves a first BLAST involving BLASTing a query sequence (for example using any of the sequences listed in Tables A, F or J of the Examples section) against any sequence database, such as the publicly available NCBI database. BLASTN or TBLASTX (using standard default values) are generally used when starting from a nucleotide sequence, and BLASTP or TBLASTN (using standard default values) when starting from a protein sequence. The BLAST results may optionally be filtered. The full-length sequences of either the filtered results or non-filtered results are then BLASTed back (second BLAST) against sequences from the organism from which the query sequence is derived. The results of the first and second BLASTs are then compared. A paralogue is identified if a high-ranking hit from the first blast is from the same species as from which the query sequence is derived, a BLAST back then ideally results in the query sequence amongst the highest hits; an orthologue is identified if a high-ranking hit in the first BLAST is not from the same species as from which the query sequence is derived, and preferably results upon BLAST back in the query sequence being among the highest hits.

[0048] High-ranking hits are those having a low E-value. The lower the E-value, the more significant the score (or in other words the lower the chance that the hit was found by chance). Computation of the E-value is well known in the art. In addition to E-values, comparisons are also scored by percentage identity. Percentage identity refers to the number of identical nucleotides (or amino acids) between the two compared nucleic acid (or polypeptide) sequences over a particular length. In the case of large families, ClustalW may be used, followed by a neighbour joining tree, to help visualize clustering of related genes and to identify orthologues and paralogues.

### Hybridisation

[0049] The term “hybridisation” as defined herein is a process wherein substantially homologous complementary nucleotide sequences anneal to each other. The hybridisation process can occur entirely in solution, i.e. both complementary nucleic acids are in solution. The hybridisation process can also occur with one of the complementary nucleic acids immobilised to a matrix such as magnetic beads, Sepharose beads or any other resin. The hybridisation process can furthermore occur with one of the complementary nucleic acids immobilised to a solid support such as a nitro-cellulose or nylon membrane or immobilised by e.g. photolithography to, for example, a siliceous glass support (the latter known as nucleic acid arrays or microarrays or as nucleic acid chips). In order to allow hybridisation to occur, the nucleic acid molecules are generally thermally or chemically denatured to melt a double strand into two single strands and/or to remove hairpins or other secondary structures from single stranded nucleic acids.

[0050] The term “stringency” refers to the conditions under which a hybridisation takes place. The stringency of hybridisation is influenced by conditions such as temperature, salt concentration, ionic strength and hybridisation buffer composition. Generally, low stringency conditions are selected to be about 30° C. lower than the thermal melting point (Tₘ) for the specific sequence at a defined ionic strength and pH. Medium stringency conditions are when the temperature is 20° C. below Tₘ, and high stringency conditions are when the temperature is 10° C. below Tₘ. High stringency hybridisation conditions are typically used for isolating hybridising sequences that have high sequence similarity to the target nucleic acid sequence. However, nucleic acids may deviate in sequence and still encode a substantially identical polypeptide, due to the degeneracy of the genetic code. Therefore medium stringency hybridisation conditions may sometimes be needed to identify such nucleic acid molecules.

[0051] The Tm is the temperature under defined ionic strength and pH, at which 50% of the target sequence hybridises to a perfectly matched probe. The Tₘ is dependent upon the solution conditions and the base composition and length of the probe. For example, longer sequences hybridise specifically at higher temperatures. The maximum rate of hybridisation is obtained from about 16° C. up to 32° C. below Tₘ. The presence of monovalent cations in the hybridisation solution reduce the electrostatic repulsion between the two nucleic acid strands thereby promoting hybrid formation; this effect is visible for sodium concentrations of up to 0.4M (for higher concentrations, this effect may be ignored). Formamide reduces the melting temperature of DNA-DNA and DNA-RNA duplexes with 0.6 to 0.7° C. for each percent formamide, and addition of 50% formamide allows hybridisation to be performed at 30 to 45° C., though the rate of hybridisation will be lowered. Base pair mismatches reduce the hybridisation rate and the thermal stability of the duplexes. On average and for large probes, the Tm decreases about 1° C. per % base mismatch. The Tm may be calculated using the following equations, depending on the types of hybrids:

1) DNA-DNA hybrids (Meinkoth and Wahl, Anal. Biochem., 138: 267-284, 1984):

Tₘ=81.5° C.+16.6×log₁₀[Na⁺]^{a}+0.41×%[G/C^{b}]−500×[L^{c}]⁻¹−0.61×% formamide

2) DNA-RNA or RNA-RNA hybrids:

Tₘ=79.8+18.5(log₁₀[Na⁺]^{a})+0.58(% G/C^{b})+11.8(% G/C^{b})²−820/L^{c}

3) oligo-DNA or oligo-RNAs hybrids:

For <20 nucleotides: Tₘ=2(Iₙ)

For 20-35 nucleotides: Tₘ=22+1.46(Iₙ)

^{a} or for other monovalent cation, but only accurate in the 0.01-0.4 M range.
^{b} only accurate for % GC in the 30% to 75% range.
^{c} L=length of duplex in base pairs.
^{d} oligo, oligonucleotide; Iₙ, =effective length of primer=2(no. of G/C)+(no. of NT).

[0052] Non-specific binding may be controlled using any one of a number of known techniques such as, for example, blocking the membrane with protein containing solutions, additions of heterologous RNA, DNA, and SDS to the hybridisation buffer, and treatment with Rnase. For non-homologous probes, a series of hybridizations may be performed by varying one of (i) progressively lowering the annealing temperature (for example from 68° C. to 42° C.) or (ii) progressively lowering the formamide concentration (for example from 50% to 0%). The skilled artisan is aware of various parameters which may be altered during hybridisation and which will either maintain or change the stringency conditions.

[0053] Besides the hybridisation conditions, specificity of hybridisation typically also depends on the function of post-hybridisation washes. To remove background resulting from non-specific hybridisation, samples are washed with dilute salt solutions. Critical factors of such washes include the ionic strength and temperature of the final wash solution: the lower the salt concentration and the higher the wash temperature, the higher the stringency of the wash. Wash conditions are typically performed at or below hybridisation stringency. A positive hybridisation gives a signal that is at least twice of that of the background. Generally, suitable stringent conditions for nucleic acid hybridisation assays or gene amplification detection procedures are as set forth above. More or less stringent conditions may also be selected. The skilled artisan is aware of various parameters which may be altered during washing and which will either maintain or change the stringency conditions.

[0054] For example, typical high stringency hybridisation conditions for DNA hybrids longer than 50 nucleotides encompass hybridisation at 65° C. in 1×SSC or at 42° C. in 1×SSC and 50% formamide, followed by washing at 65° C. in 0.3×SSC. Examples of medium stringency hybridisation conditions for DNA hybrids longer than 50 nucleotides encompass hybridisation at 50° C. in 4×SSC or at 40° C. in 6×SSC and 50% formamide, followed by washing at 50° C. in 2×SSC. The length of the hybrid is the anticipated length for the hybridising nucleic acid. When nucleic acids of known sequence are hybridised, the hybrid length may be determined by aligning the sequences and identifying the conserved regions described herein. 1×SSC is 0.15M NaCl and 15 mM sodium citrate; the hybridisation solution and wash solutions may additionally include 5×Denhardt's reagent, 0.5-1.0% SDS, 100 μg/ml denatured, fragmented salmon sperm DNA, 0.5% sodium pyrophosphate.

[0055] For the purposes of defining the level of stringency, reference can be made to Sambrook et al. (2001) Molecular Cloning: a laboratory manual, 3rd Edition, Cold Spring Harbor Laboratory Press, CSH, New York or to Current Protocols in Molecular Biology, John Wiley & Sons, N.Y. (1989 and yearly updates).

### Splice Variant

[0056] The term “splice variant” as used herein encompasses variants of a nucleic acid sequence in which selected introns and/or exons have been excised, replaced, displaced or added, or in which introns have been shortened or lengthened. Such variants will be ones in which the biological activity of the protein is substantially retained; this may be achieved by selectively retaining functional segments of the protein. Such splice variants may be found in nature or may be manmade. Methods for predicting and isolating such splice variants are well known in the art (see for example Foissac and Schiex (2005) BMC Bioinformatics 6: 25).

### Allelic Variant

[0057] Alleles or allelic variants are alternative forms of a given gene, located at the same chromosomal position. Allelic variants encompass Single Nucleotide Polymorphisms (SNPs), as well as Small Insertion/Deletion Polymorphisms (INDELs). The size of INDELs is usually less than 100 bp. SNPs and INDELs form the largest set of sequence variants in naturally occurring polymorphic strains of most organisms.

### Endogenous Gene

[0058] Reference herein to an “endogenous” gene not only refers to the gene in question as found in a plant in its natural form (i.e., without there being any human intervention), but also refers to that same gene (or a substantially homologous nucleic acid/gene) in an isolated form subsequently (re)introduced into a plant (a transgene). For example, a transgenic plant containing such a transgene may encounter a substantial reduction of the transgene expression and/or substantial reduction of expression of the endogenous gene. The isolated gene may be isolated from an organism or may be manmade, for example by chemical synthesis.

### Gene Shuffling/Directed Evolution

[0059] Gene shuffling or directed evolution consists of iterations of DNA shuffling followed by appropriate screening and/or selection to generate variants of nucleic acids or portions thereof encoding proteins having a modified biological activity (Castle et al., (2004) Science 304(5674): 1151-4; U.S. Pat. Nos. 5,811,238 and 6,395,547).

### Construct

[0060] Additional regulatory elements may include transcriptional as well as translational enhancers. Those skilled in the art will be aware of terminator and enhancer sequences that may be suitable for use in performing the invention. An intron sequence may also be added to the 5′ untranslated region (UTR) or in the coding sequence to increase the amount of the mature message that accumulates in the cytosol, as described in the definitions section. Other control sequences (besides promoter, enhancer, silencer, intron sequences, 3′UTR and/or 5′UTR regions) may be protein and/or RNA stabilizing elements. Such sequences would be known or may readily be obtained by a person skilled in the art.

[0061] The genetic constructs of the invention may further include an origin of replication sequence that is required for maintenance and/or replication in a specific cell type. One example is when a genetic construct is required to be maintained in a bacterial cell as an episomal genetic element (e.g. plasmid or cosmid molecule). Preferred origins of replication include, but are not limited to, the f1-ori and colE1.

[0062] For the detection of the successful transfer of the nucleic acid sequences as used in the methods of the invention and/or selection of transgenic plants comprising these nucleic acids, it is advantageous to use marker genes (or reporter genes). Therefore, the genetic construct may optionally comprise a selectable marker gene. Selectable markers are described in more detail in the “definitions” section herein. The marker genes may be removed or excised from the transgenic cell once they are no longer needed. Techniques for marker removal are known in the art, useful techniques are described above in the definitions section.

### Regulatory Element/Control Sequence/Promoter

[0063] The terms “regulatory element”, “control sequence” and “promoter” are all used interchangeably herein and are to be taken in a broad context to refer to regulatory nucleic acid sequences capable of effecting expression of the sequences to which they are ligated. The term “promoter” typically refers to a nucleic acid control sequence located upstream from the transcriptional start of a gene and which is involved in recognising and binding of RNA polymerase and other proteins, thereby directing transcription of an operably linked nucleic acid. Encompassed by the aforementioned terms are transcriptional regulatory sequences derived from a classical eukaryotic genomic gene (including the TATA box which is required for accurate transcription initiation, with or without a CCAAT box sequence) and additional regulatory elements (i.e. upstream activating sequences, enhancers and silencers) which alter gene expression in response to developmental and/or external stimuli, or in a tissue-specific manner. Also included within the term is a transcriptional regulatory sequence of a classical prokaryotic gene, in which case it may include a −35 box sequence and/or −10 box transcriptional regulatory sequences. The term “regulatory element” also encompasses a synthetic fusion molecule or derivative that confers, activates or enhances expression of a nucleic acid molecule in a cell, tissue or organ.

[0064] A “plant promoter” comprises regulatory elements, which mediate the expression of a coding sequence segment in plant cells. Accordingly, a plant promoter need not be of plant origin, but may originate from viruses or micro-organisms, for example from viruses which attack plant cells. The “plant promoter” can also originate from a plant cell, e.g. from the plant which is transformed with the nucleic acid sequence to be expressed in the inventive process and described herein. This also applies to other “plant” regulatory signals, such as “plant” terminators. The promoters upstream of the nucleotide sequences useful in the methods of the present invention can be modified by one or more nucleotide substitution(s), insertion(s) and/or deletion(s) without interfering with the functionality or activity of either the promoters, the open reading frame (ORF) or the 3′-regulatory region such as terminators or other 3′ regulatory regions which are located away from the ORF. It is furthermore possible that the activity of the promoters is increased by modification of their sequence, or that they are replaced completely by more active promoters, even promoters from heterologous organisms. For expression in plants, the nucleic acid molecule must, as described above, be linked operably to or comprise a suitable promoter which expresses the gene at the right point in time and with the required spatial expression pattern.

[0065] For the identification of functionally equivalent promoters, the promoter strength and/or expression pattern of a candidate promoter may be analysed for example by operably linking the promoter to a reporter gene and assaying the expression level and pattern of the reporter gene in various tissues of the plant. Suitable well-known reporter genes include for example beta-glucuronidase or beta-galactosidase. The promoter activity is assayed by measuring the enzymatic activity of the beta-glucuronidase or beta-galactosidase. The promoter strength and/or expression pattern may then be compared to that of a reference promoter (such as the one used in the methods of the present invention). Alternatively, promoter strength may be assayed by quantifying mRNA levels or by comparing mRNA levels of the nucleic acid used in the methods of the present invention, with mRNA levels of housekeeping genes such as 18S rRNA, using methods known in the art, such as Northern blotting with densitometric analysis of autoradiograms, quantitative real-time PCR or RT-PCR (Heid et al., 1996 Genome Methods 6: 986-994). Generally by “weak promoter” is intended a promoter that drives expression of a coding sequence at a low level. By “low level” is intended at levels of about 1/10,000 transcripts to about 1/100,000 transcripts, to about 1/500,0000 transcripts per cell. Conversely, a “strong promoter” drives expression of a coding sequence at high level, or at about 1/10 transcripts to about 1/100 transcripts to about 1/1000 transcripts per cell. Generally, by “medium strength promoter” is intended a promoter that drives expression of a coding sequence at a lower level than a strong promoter, in particular at a level that is in all instances below that obtained when under the control of a 35S CaMV promoter.

### Operably Linked

[0066] The term “operably linked” as used herein refers to a functional linkage between the promoter sequence and the gene of interest, such that the promoter sequence is able to initiate transcription of the gene of interest.

### Constitutive Promoter

[0067] A “constitutive promoter” refers to a promoter that is transcriptionally active during most, but not necessarily all, phases of growth and development and under most environmental conditions, in at least one cell, tissue or organ. Table 2a below gives examples of constitutive promoters.

TABLE 2a
Examples of constitutive promoters

| Gene Source | Reference |
|---|---|
| Actin | McElroy et al, Plant Cell, 2: 163-171, 1990 |
| HMGP | WO 2004/070039 |
| CAMV 35S | Odell et al, Nature, 313: 810-812, 1985 |
| CaMV 19S | Nilsson et al., Physiol. Plant. 100: 456-462, 1997 |
| GOS2 | de Pater et al, Plant J Nov; 2(6): 837-44, 1992, |
| | WO 2004/065596 |
| Ubiquitin | Christensen et al, Plant Mol. Biol. 18: 675-689, |
| | 1992 |
| Rice cyclophilin | Buchholz et al, Plant Mol Biol. 25(5): 837-43, 1994 |
| Maize H3 histone | Lepetit et al, Mol. Gen. Genet. 231: 276-285, 1992 |
| Alfalfa H3 histone | Wu et al. Plant Mol. Biol. 11: 641-649, 1988 |
| Actin 2 | An et al, Plant J. 10(1); 107-121, 1996 |
| 34S FMV | Sanger et al., Plant. Mol. Biol., 14, 1990: 433-443 |
| Rubisco small | U.S. Pat. No. 4,962,028 |
| subunit | |
| OCS | Leisner (1988) Proc Natl Acad Sci USA 85(5): 2553 |
| SAD1 | Jain et al., Crop Science, 39 (6), 1999: 1696 |
| SAD2 | Jain et al., Crop Science, 39 (6), 1999: 1696 |
| nos | Shaw et al. (1984) Nucleic Acids Res. 12(20): |
| | 7831-7846 |
| V-ATPase | WO 01/14572 |
| Super promoter | WO 95/14098 |
| G-box proteins | WO 94/12015 |

### Ubiquitous Promoter

[0068] A ubiquitous promoter is active in substantially all tissues or cells of an organism.

### Developmentally-Regulated Promoter

[0069] A developmentally-regulated promoter is active during certain developmental stages or in parts of the plant that undergo developmental changes.

### Inducible Promoter

[0070] An inducible promoter has induced or increased transcription initiation in response to a chemical (for a review see Gatz 1997, Annu. Rev. Plant Physiol. Plant Mol. Biol., 48:89-108), environmental or physical stimulus, or may be “stress-inducible”, i.e. activated when a plant is exposed to various stress conditions, or a “pathogen-inducible” i.e. activated when a plant is exposed to exposure to various pathogens.

### Organ-Specific/Tissue-Specific Promoter

[0071] An organ-specific or tissue-specific promoter is one that is capable of preferentially initiating transcription in certain organs or tissues, such as the leaves, roots, seed tissue etc. For example, a “root-specific promoter” is a promoter that is transcriptionally active predominantly in plant roots, substantially to the exclusion of any other parts of a plant, whilst still allowing for any leaky expression in these other plant parts. Promoters able to initiate transcription in certain cells only are referred to herein as “cell-specific”.

[0072] Examples of root-specific promoters are listed in Table 2b below:

TABLE 2b
Examples of root-specific promoters

| Gene Source | Reference |
|---|---|
| RCc3 | Plant Mol Biol. 1995 January; 27(2): 237-48 |
| Arabidopsis PHT1 | Kovama et al., 2005; Mudge et al. (2002, |
| | Plant J. 31: 341) |
| Medicago phosphate | Xiao et al., 2006 |
| transporter | |
| Arabidopsis Pyk10 | Nitz et al. (2001) Plant Sci 161(2): 337-346 |
| root-expressible genes | Tingey et al., EMBO J. 6: 1, 1987. |
| tobacco | Van der Zaal et al., Plant Mol. Biol. 16, |
| auxin-inducible gene | 983, 1991. |
| β-tubulin | Oppenheimer, et al., Gene 63: 87, 1988. |
| tobacco root-specific | Conkling, et al., Plant Physiol. 93: 1203, 1990. |
| genes | |
| B. napus G1-3b gene | U.S. Pat. No. 5,401,836 |
| SbPRP1 | Suzuki et al., Plant Mol. Biol. 21: 109-119, |
| | 1993. |
| LRX1 | Baumberger et al. 2001, Genes & Dev. 15: |
| | 1128 |
| BTG-26 Brassica napus | US 20050044585 |
| LeAMT1 (tomato) | Lauter et al. (1996, PNAS 3: 8139) |
| The LeNRT1-1 (tomato) | Lauter et al. (1996, PNAS 3: 8139) |
| class I patatin gene | Liu et al., Plant Mol. Biol. 153: 386-395, 1991. |
| (potato) | |
| KDC1 (Daucus carota) | Downey et al. (2000, J. Biol. Chem. 275: |
| | 39420) |
| TobRB7 gene | W Song (1997) PhD Thesis, North Carolina |
| | State University, Raleigh, NC USA |
| OsRAB5a (rice) | Wang et al. 2002, Plant Sci. 163: 273 |
| ALF5 (Arabidopsis) | Diener et al. (2001, Plant Cell 13: 1625) |
| NRT2; 1Np | Quesada et al. (1997, Plant Mol. Biol. 34: 265) |
| (N. plumbaginifolia) | |

[0073] A seed-specific promoter is transcriptionally active predominantly in seed tissue, but not necessarily exclusively in seed tissue (in cases of leaky expression). The seed-specific promoter may be active during seed development and/or during germination. The seed specific promoter may be endosperm/aleurone/embryo specific. Examples of seed-specific promoters (endosperm/aleurone/embryo specific) are shown in Table 2c to Table 2f below. Further examples of seed-specific promoters are given in Qing Qu and Takaiwa (Plant Biotechnol. J. 2, 113-125, 2004), which disclosure is incorporated by reference herein as if fully set forth.

TABLE 2c
Examples of seed-specific promoters

| Gene source | Reference |
|---|---|
| seed-specific genes | Simon et al., Plant Mol. Biol. 5: 191, 1985; |
| | Scofield et al., J. Biol. Chem. 262: 12202, 1987.; |
| | Baszczynski et al., Plant Mol. Biol. 14: 633, |
| | 1990. |
| Brazil Nut albumin | Pearson et al., Plant Mol. Biol. 18: 235-245, |
| | 1992. |
| legumin | Ellis et al., Plant Mol. Biol. 10: 203-214, 1988. |
| glutelin (rice) | Takaiwa et al., Mol. Gen. Genet. 208: 15-22, |
| | 1986; |
| | Takaiwa et al., FEBS Letts. 221: 43-47, 1987. |
| zein | Matzke et al Plant Mol Biol, 14(3): 323-32 1990 |
| napA | Stalberg et al, Planta 199: 515-519, 1996. |
| wheat LMW and | Mol Gen Genet 216: 81-90, 1989; NAR 17: |
| HMW glutenin-1 | 461-2, 1989 |
| wheat SPA | Albani et al, Plant Cell, 9: 171-184, 1997 |
| wheat α, β, | EMBO J. 3: 1409-15, 1984 |
| γ-gliadins | |
| barley Itr1 promoter | Diaz et al. (1995) Mol Gen Genet 248(5): 592-8 |
| barley B1, C, D, | Theor Appl Gen 98: 1253-62, 1999; Plant J 4: |
| hordein | 343-55, 1993; Mol Gen Genet 250: 750-60, |
| | 1996 |
| barley DOF | Mena et al, The Plant Journal, 116(1): 53-62, |
| | 1998 |
| blz2 | EP99106056.7 |
| synthetic promoter | Vicente-Carbajosa et al., Plant J. 13: 629-640, |
| | 1998. |
| rice prolamin NRP33 | Wu et al, Plant Cell Physiology 39(8) 885-889, |
| | 1998 |
| rice a-globulin Glb-1 | Wu et al, Plant Cell Physiology 39(8) 885-889, |
| | 1998 |
| rice OSH1 | Sato et al, Proc. Natl. Acad. Sci. USA, 93: |
| | 8117-8122, 1996 |
| rice α-globulin | Nakase et al. Plant Mol. Biol. 33: 513-522, 1997 |
| REB/OHP-1 | |
| rice ADP-glucose | Trans Res 6: 157-68, 1997 |
| pyrophosphorylase | |
| maize ESR gene | Plant J 12: 235-46, 1997 |
| family | |
| sorghum α-kafirin | DeRose et al., Plant Mol. Biol 32: 1029-35, 1996 |
| KNOX | Postma-Haarsma et al, Plant Mol. Biol. 39: |
| | 257-71, 1999 |
| rice oleosin | Wu et al, J. Biochem. 123: 386, 1998 |
| sunflower oleosin | Cummins et al., Plant Mol. Biol. 19: 873-876, |
| | 1992 |
| PRO0117, putative | WO 2004/070039 |
| rice 40S ribosomal | |
| protein | |
| PRO0136, rice alanine | unpublished |
| aminotransferase | |
| PRO0147, trypsin | unpublished |
| inhibitor ITR1 (barley) | |
| PRO0151, rice WSI18 | WO 2004/070039 |
| PRO0175, rice RAB21 | WO 2004/070039 |
| PRO005 | WO 2004/070039 |
| PRO0095 | WO 2004/070039 |
| α-amylase (Amy32b) | Lanahan et al, Plant Cell 4: 203-211, 1992; |
| | Skriver et al, Proc Natl Acad Sci USA 88: |
| | 7266-7270, 1991 |
| cathepsin β-like gene | Cejudo et al, Plant Mol Biol 20: 849-856, 1992 |
| Barley Ltp2 | Kalla et al., Plant J. 6: 849-60, 1994 |
| Chi26 | Leah et al., Plant J. 4: 579-89, 1994 |
| Maize B-Peru | Selinger et al., Genetics 149; 1125-38, 1998 |

TABLE 2d
examples of endosperm-specific promoters

| Gene source | Reference |
|---|---|
| glutelin (rice) | Takaiwa et al. (1986) Mol Gen Genet 208: 15-22; |
| | Takaiwa et al. (1987) FEBS Letts. 221: 43-47 |
| zein | Matzke et al., (1990) Plant Mol Biol 14(3): |
| | 323-32 |
| wheat LMW and | Colot et al. (1989) Mol Gen Genet 216: 81-90, |
| HMW glutenin-1 | Anderson et al. (1989) NAR 17: 461-2 |
| wheat SPA | Albani et al. (1997) Plant Cell 9: 171-184 |
| wheat gliadins | Rafalski et al. (1984) EMBO 3: 1409-15 |
| barley Itr1 promoter | Diaz et al. (1995) Mol Gen Genet 248(5): 592-8 |
| barley B1, C, D, | Cho et al. (1999) Theor Appl Genet 98: 1253-62; |
| hordein | Muller et al. (1993) Plant J 4: 343-55; |
| | Sorenson et al. (1996) Mol Gen Genet 250: |
| | 750-60 |
| barley DOF | Mena et al, (1998) Plant J 116(1): 53-62 |
| blz2 | Onate et al. (1999) J Biol Chem 274(14): 9175-82 |
| synthetic promoter | Vicente-Carbajosa et al. (1998) Plant J 13: |
| | 629-640 |
| rice prolamin NRP33 | Wu et al, (1998) Plant Cell Physiol 39(8) 885-889 |
| rice globulin Glb-1 | Wu et al. (1998) Plant Cell Physiol 39(8) 885-889 |
| rice globulin | Nakase et al. (1997) Plant Molec Biol 33: |
| REB/OHP-1 | 513-522 |
| rice ADP-glucose | Russell et al. (1997) Trans Res 6: 157-68 |
| pyrophosphorylase | |
| maize ESR gene | Opsahl-Ferstad et al. (1997) Plant J 12: 235-46 |
| family | |
| sorghum kafirin | DeRose et al. (1996) Plant Mol Biol 32: 1029-35 |

TABLE 2e
Examples of embryo specific promoters:

| Gene source | Reference |
|---|---|
| rice OSH1 | Sato et al, Proc. Natl. Acad. Sci. USA, 93: |
| | 8117-8122, 1996 |
| KNOX | Postma-Haarsma et al, Plant Mol. Biol. 39: |
| | 257-71, 1999 |
| PRO0151 | WO 2004/070039 |
| PRO0175 | WO 2004/070039 |
| PRO005 | WO 2004/070039 |
| PRO0095 | WO 2004/070039 |

TABLE 2f
Examples of aleurone-specific promoters:

| Gene source | Reference |
|---|---|
| α-amylase (Amy32b) | Lanahan et al, Plant Cell 4: 203-211, 1992; |
| | Skriver et al, Proc Natl Acad Sci USA 88: |
| | 7266-7270, 1991 |
| cathepsin β-like gene | Cejudo et al, Plant Mol Biol 20: 849-856, 1992 |
| Barley Ltp2 | Kalla et al., Plant J. 6: 849-60, 1994 |
| Chi26 | Leah et al., Plant J. 4: 579-89, 1994 |
| Maize B-Peru | Selinger et al., Genetics 149; 1125-38, 1998 |

[0074] A green tissue-specific promoter as defined herein is a promoter that is transcriptionally active predominantly in green tissue, substantially to the exclusion of any other parts of a plant, whilst still allowing for any leaky expression in these other plant parts.

[0075] Examples of green tissue-specific promoters which may be used to perform the methods of the invention are shown in Table 2g below.

TABLE 2g
Examples of green tissue-specific promoters

| Gene | Expression | Reference |
|---|---|---|
| Maize Orthophosphate dikinase | Leaf specific | Fukavama et al., 2001 |
| Maize Phosphoenolpyruvate | Leaf specific | Kausch et al., 2001 |
| carboxylase | | |
| Rice Phosphoenolpyruvate | Leaf specific | Liu et al., 2003 |
| carboxylase | | |
| Rice small subunit Rubisco | Leaf specific | Nomura et al., 2000 |
| rice beta expansin EXBP9 | Shoot specific | WO 2004/070039 |
| Pigeonpea small subunit | Leaf specific | Panguluri et al., 2005 |
| Rubisco | | |
| Pea RBCS3A | Leaf specific | |

[0076] Another example of a tissue-specific promoter is a meristem-specific promoter, which is transcriptionally active predominantly in meristematic tissue, substantially to the exclusion of any other parts of a plant, whilst still allowing for any leaky expression in these other plant parts. Examples of green meristem-specific promoters which may be used to perform the methods of the invention are shown in Table 2h below.

TABLE 2h
Examples of meristem-specific promoters

| Gene source | Expression pattern | Reference |
|---|---|---|
| rice OSH1 | Shoot apical meristem, | Sato et al. (1996) |
| | from embryo globular stage | Proc. Natl. Acad. Sci. |
| | to seedling stage | USA, 93: 8117-8122 |
| Rice metallothionein | Meristem specific | BAD87835.1 |
| WAK1 & WAK 2 | Shoot and root apical | Wagner & Kohorn |
| | meristems, and in | (2001) Plant Cell |
| | expanding leaves and | 13(2): 303-318 |
| | sepals | |

### Terminator

[0077] The term “terminator” encompasses a control sequence which is a DNA sequence at the end of a transcriptional unit which signals 3′ processing and polyadenylation of a primary transcript and termination of transcription. The terminator can be derived from the natural gene, from a variety of other plant genes, or from T-DNA. The terminator to be added may be derived from, for example, the nopaline synthase or octopine synthase genes, or alternatively from another plant gene, or less preferably from any other eukaryotic gene.

### Selectable Marker (Gene)/Reporter Gene

[0078] “Selectable marker”, “selectable marker gene” or “reporter gene” includes any gene that confers a phenotype on a cell in which it is expressed to facilitate the identification and/or selection of cells that are transfected or transformed with a nucleic acid construct of the invention. These marker genes enable the identification of a successful transfer of the nucleic acid molecules via a series of different principles. Suitable markers may be selected from markers that confer antibiotic or herbicide resistance, that introduce a new metabolic trait or that allow visual selection. Examples of selectable marker genes include genes conferring resistance to antibiotics (such as nptII that phosphorylates neomycin and kanamycin, or hpt, phosphorylating hygromycin, or genes conferring resistance to, for example, bleomycin, streptomycin, tetracyclin, chloramphenicol, ampicillin, gentamycin, geneticin (G418), spectinomycin or blasticidin), to herbicides (for example bar which provides resistance to Basta®; aroA or gox providing resistance against glyphosate, or the genes conferring resistance to, for example, imidazolinone, phosphinothricin or sulfonylurea), or genes that provide a metabolic trait (such as manA that allows plants to use mannose as sole carbon source or xylose isomerase for the utilisation of xylose, or antinutritive markers such as the resistance to 2-deoxyglucose). Expression of visual marker genes results in the formation of colour (for example δ-glucuronidase, GUS or δ-galactosidase with its coloured substrates, for example X-Gal), luminescence (such as the luciferin/luceferase system) or fluorescence (Green Fluorescent Protein, GFP, and derivatives thereof). This list represents only a small number of possible markers. The skilled worker is familiar with such markers. Different markers are preferred, depending on the organism and the selection method.

[0079] It is known that upon stable or transient integration of nucleic acids into plant cells, only a minority of the cells takes up the foreign DNA and, if desired, integrates it into its genome, depending on the expression vector used and the transfection technique used. To identify and select these integrants, a gene coding for a selectable marker (such as the ones described above) is usually introduced into the host cells together with the gene of interest. These markers can for example be used in mutants in which these genes are not functional by, for example, deletion by conventional methods. Furthermore, nucleic acid molecules encoding a selectable marker can be introduced into a host cell on the same vector that comprises the sequence encoding the polypeptides of the invention or used in the methods of the invention, or else in a separate vector. Cells which have been stably transfected with the introduced nucleic acid can be identified for example by selection (for example, cells which have integrated the selectable marker survive whereas the other cells die).

[0080] Since the marker genes, particularly genes for resistance to antibiotics and herbicides, are no longer required or are undesired in the transgenic host cell once the nucleic acids have been introduced successfully, the process according to the invention for introducing the nucleic acids advantageously employs techniques which enable the removal or excision of these marker genes. One such a method is what is known as co-transformation. The co-transformation method employs two vectors simultaneously for the transformation, one vector bearing the nucleic acid according to the invention and a second bearing the marker gene(s). A large proportion of transformants receives or, in the case of plants, comprises (up to 40% or more of the transformants), both vectors. In case of transformation with Agrobacteria, the transformants usually receive only a part of the vector, i.e. the sequence flanked by the T-DNA, which usually represents the expression cassette. The marker genes can subsequently be removed from the transformed plant by performing crosses. In another method, marker genes integrated into a transposon are used for the transformation together with desired nucleic acid (known as the Ac/Ds technology). The transformants can be crossed with a transposase source or the transformants are transformed with a nucleic acid construct conferring expression of a transposase, transiently or stable. In some cases (approx. 10%), the transposon jumps out of the genome of the host cell once transformation has taken place successfully and is lost. In a further number of cases, the transposon jumps to a different location. In these cases the marker gene must be eliminated by performing crosses. In microbiology, techniques were developed which make possible, or facilitate, the detection of such events. A further advantageous method relies on what is known as recombination systems; whose advantage is that elimination by crossing can be dispensed with. The best-known system of this type is what is known as the Cre/lox system. Cre1 is a recombinase that removes the sequences located between the loxP sequences. If the marker gene is integrated between the loxP sequences, it is removed once transformation has taken place successfully, by expression of the recombinase. Further recombination systems are the HIN/HIX, FLP/FRT and REP/STB system (Tribble et al., J. Biol. Chem., 275, 2000: 22255-22267; Velmurugan et al., J. Cell Biol., 149, 2000: 553-566). A site-specific integration into the plant genome of the nucleic acid sequences according to the invention is possible. Naturally, these methods can also be applied to microorganisms such as yeast, fungi or bacteria.

### Transgenic/Transgene/Recombinant

[0081] For the purposes of the invention, “transgenic”, “transgene” or “recombinant” means with regard to, for example, a nucleic acid sequence, an expression cassette, gene construct or a vector comprising the nucleic acid sequence or an organism transformed with the nucleic acid sequences, expression cassettes or vectors according to the invention, all those constructions brought about by recombinant methods in which either
[0082] (a) the nucleic acid sequences encoding proteins useful in the methods of the invention, or
[0083] (b) genetic control sequence(s) which is operably linked with the nucleic acid sequence according to the invention, for example a promoter, or
[0084] (c) a) and b)
   are not located in their natural genetic environment or have been modified by recombinant methods, it being possible for the modification to take the form of, for example, a substitution, addition, deletion, inversion or insertion of one or more nucleotide residues. The natural genetic environment is understood as meaning the natural genomic or chromosomal locus in the original plant or the presence in a genomic library. In the case of a genomic library, the natural genetic environment of the nucleic acid sequence is preferably retained, at least in part. The environment flanks the nucleic acid sequence at least on one side and has a sequence length of at least 50 bp, preferably at least 500 bp, especially preferably at least 1000 bp, most preferably at least 5000 bp. A naturally occurring expression cassette—for example the naturally occurring combination of the natural promoter of the nucleic acid sequences with the corresponding nucleic acid sequence encoding a polypeptide useful in the methods of the present invention, as defined above—becomes a transgenic expression cassette when this expression cassette is modified by non-natural, synthetic (“artificial”) methods such as, for example, mutagenic treatment. Suitable methods are described, for example, in U.S. Pat. No. 5,565,350 or WO 00/15815.

[0085] A transgenic plant for the purposes of the invention is thus understood as meaning, as above, that the nucleic acids used in the method of the invention are not present in, or originating from, the genome of said plant; or are present in the genome of said plant but not at their natural locus in the genome of said plant, it being possible for the nucleic acids to be expressed homologously or heterologously. However, as mentioned, transgenic also means that, while the nucleic acids according to the invention or used in the inventive method are at their natural position in the genome of a plant, the sequence has been modified with regard to the natural sequence, and/or that the regulatory sequences of the natural sequences have been modified. Transgenic is preferably understood as meaning the expression of the nucleic acids according to the invention at an unnatural locus in the genome, i.e. homologous or, preferably, heterologous expression of the nucleic acids takes place. Preferred transgenic plants are mentioned herein.

[0086] It shall further be noted that in the context of the present invention, the term “isolated nucleic acid” or “isolated polypeptide” may in some instances be considered as a synonym for a “recombinant nucleic acid” or a “recombinant polypeptide”, respectively and refers to a nucleic acid or polypeptide that is not located in its natural genetic environment and/or that has been modified by recombinant methods.

### Modulation

[0087] The term “modulation” means in relation to expression or gene expression, a process in which the expression level is changed by said gene expression in comparison to the control plant, the expression level may be increased or decreased. The original, unmodulated expression may be of any kind of expression of a structural RNA (rRNA, tRNA) or mRNA with subsequent translation. For the purposes of this invention, the original unmodulated expression may also be absence of any expression. The term “modulating the activity” shall mean any change of the expression of the inventive nucleic acid sequences or encoded proteins, which leads to increased yield and/or increased growth of the plants. The expression can increase from zero (absence of or immeasurable expression) to a certain amount, or can decrease from a certain amount to immeasurable small amounts or zero.

### Expression

[0088] The term “expression” or “gene expression” means the transcription of a specific gene or specific genes or specific genetic construct. The term “expression” or “gene expression” in particular means the transcription of a gene or genes or genetic construct into structural RNA (rRNA, tRNA) or mRNA with or without subsequent translation of the latter into a protein. The process includes transcription of DNA and processing of the resulting mRNA product.

### Increased Expression/Overexpression

[0089] The term “increased expression” or “overexpression” as used herein means any form of expression that is additional to the original wild-type expression level. For the purposes of this invention, the original wild-type expression level might also be zero (absence of or immeasurable expression).

[0090] Methods for increasing expression of genes or gene products are well documented in the art and include, for example, overexpression driven by appropriate promoters, the use of transcription enhancers or translation enhancers. Isolated nucleic acids which serve as promoter or enhancer elements may be introduced in an appropriate position (typically upstream) of a non-heterologous form of a polynucleotide so as to upregulate expression of a nucleic acid encoding the polypeptide of interest. For example, endogenous promoters may be altered in vivo by mutation, deletion, and/or substitution (see, Kmiec, U.S. Pat. No. 5,565,350; Zarling et al., WO9322443), or isolated promoters may be introduced into a plant cell in the proper orientation and distance from a gene of the present invention so as to control the expression of the gene.

[0091] If polypeptide expression is desired, it is generally desirable to include a polyadenylation region at the 3′-end of a polynucleotide coding region. The polyadenylation region can be derived from the natural gene, from a variety of other plant genes, or from T-DNA. The 3′ end sequence to be added may be derived from, for example, the nopaline synthase or octopine synthase genes, or alternatively from another plant gene, or less preferably from any other eukaryotic gene.

[0092] An intron sequence may also be added to the 5′ untranslated region (UTR) or the coding sequence of the partial coding sequence to increase the amount of the mature message that accumulates in the cytosol. Inclusion of a spliceable intron in the transcription unit in both plant and animal expression constructs has been shown to increase gene expression at both the mRNA and protein levels up to 1000-fold (Buchman and Berg (1988) Mol. Cell biol. 8: 4395-4405; Callis et al. (1987) Genes Dev 1:1183-1200). Such intron enhancement of gene expression is typically greatest when placed near the 5′ end of the transcription unit. Use of the maize introns Adh1-S intron 1, 2, and 6, the Bronze-1 intron are known in the art. For general information see: The Maize Handbook, Chapter 116, Freeling and Walbot, Eds., Springer, N.Y. (1994).

### Decreased Expression

[0093] Reference herein to “decreased expression” or “reduction or substantial elimination” of expression is taken to mean a decrease in endogenous gene expression and/or polypeptide levels and/or polypeptide activity relative to control plants. The reduction or substantial elimination is in increasing order of preference at least 10%, 20%, 30%, 40% or 50%, 60%, 70%, 80%, 85%, 90%, or 95%, 96%, 97%, 98%, 99% or more reduced compared to that of control plants.

[0094] For the reduction or substantial elimination of expression an endogenous gene in a plant, a sufficient length of substantially contiguous nucleotides of a nucleic acid sequence is required. In order to perform gene silencing, this may be as little as 20, 19, 18, 17, 16, 15, 14, 13, 12, 11, 10 or fewer nucleotides, alternatively this may be as much as the entire gene (including the 5′ and/or 3′ UTR, either in part or in whole). The stretch of substantially contiguous nucleotides may be derived from the nucleic acid encoding the protein of interest (target gene), or from any nucleic acid capable of encoding an orthologue, paralogue or homologue of the protein of interest. Preferably, the stretch of substantially contiguous nucleotides is capable of forming hydrogen bonds with the target gene (either sense or antisense strand), more preferably, the stretch of substantially contiguous nucleotides has, in increasing order of preference, 50%, 60%, 70%, 80%, 85%, 90%, 95%, 96%, 97%, 98%, 99%, 100% sequence identity to the target gene (either sense or antisense strand). A nucleic acid sequence encoding a (functional) polypeptide is not a requirement for the various methods discussed herein for the reduction or substantial elimination of expression of an endogenous gene.

[0095] This reduction or substantial elimination of expression may be achieved using routine tools and techniques. A preferred method for the reduction or substantial elimination of endogenous gene expression is by introducing and expressing in a plant a genetic construct into which the nucleic acid (in this case a stretch of substantially contiguous nucleotides derived from the gene of interest, or from any nucleic acid capable of encoding an orthologue, paralogue or homologue of any one of the protein of interest) is cloned as an inverted repeat (in part or completely), separated by a spacer (non-coding DNA).

[0096] In such a preferred method, expression of the endogenous gene is reduced or substantially eliminated through RNA-mediated silencing using an inverted repeat of a nucleic acid or a part thereof (in this case a stretch of substantially contiguous nucleotides derived from the gene of interest, or from any nucleic acid capable of encoding an orthologue, paralogue or homologue of the protein of interest), preferably capable of forming a hairpin structure. The inverted repeat is cloned in an expression vector comprising control sequences. A non-coding DNA nucleic acid sequence (a spacer, for example a matrix attachment region fragment (MAR), an intron, a polylinker, etc.) is located between the two inverted nucleic acids forming the inverted repeat. After transcription of the inverted repeat, a chimeric RNA with a self-complementary structure is formed (partial or complete). This double-stranded RNA structure is referred to as the hairpin RNA (hpRNA). The hpRNA is processed by the plant into siRNAs that are incorporated into an RNA-induced silencing complex (RISC). The RISC further cleaves the mRNA transcripts, thereby substantially reducing the number of mRNA transcripts to be translated into polypeptides. For further general details see for example, Grierson et al. (1998) WO 98/53083; Waterhouse et al. (1999) WO 99/53050).

[0097] Performance of the methods of the invention does not rely on introducing and expressing in a plant a genetic construct into which the nucleic acid is cloned as an inverted repeat, but any one or more of several well-known “gene silencing” methods may be used to achieve the same effects.

[0098] One such method for the reduction of endogenous gene expression is RNA-mediated silencing of gene expression (downregulation). Silencing in this case is triggered in a plant by a double stranded RNA sequence (dsRNA) that is substantially similar to the target endogenous gene. This dsRNA is further processed by the plant into about 20 to about 26 nucleotides called short interfering RNAs (siRNAs). The siRNAs are incorporated into an RNA-induced silencing complex (RISC) that cleaves the mRNA transcript of the endogenous target gene, thereby substantially reducing the number of mRNA transcripts to be translated into a polypeptide. Preferably, the double stranded RNA sequence corresponds to a target gene.

[0099] Another example of an RNA silencing method involves the introduction of nucleic acid sequences or parts thereof (in this case a stretch of substantially contiguous nucleotides derived from the gene of interest, or from any nucleic acid capable of encoding an orthologue, paralogue or homologue of the protein of interest) in a sense orientation into a plant. “Sense orientation” refers to a DNA sequence that is homologous to an mRNA transcript thereof. Introduced into a plant would therefore be at least one copy of the nucleic acid sequence. The additional nucleic acid sequence will reduce expression of the endogenous gene, giving rise to a phenomenon known as co-suppression. The reduction of gene expression will be more pronounced if several additional copies of a nucleic acid sequence are introduced into the plant, as there is a positive correlation between high transcript levels and the triggering of co-suppression.

[0100] Another example of an RNA silencing method involves the use of antisense nucleic acid sequences. An “antisense” nucleic acid sequence comprises a nucleotide sequence that is complementary to a “sense” nucleic acid sequence encoding a protein, i.e. complementary to the coding strand of a double-stranded cDNA molecule or complementary to an mRNA transcript sequence. The antisense nucleic acid sequence is preferably complementary to the endogenous gene to be silenced. The complementarity may be located in the “coding region” and/or in the “non-coding region” of a gene. The term “coding region” refers to a region of the nucleotide sequence comprising codons that are translated into amino acid residues. The term “non-coding region” refers to 5′ and 3′ sequences that flank the coding region that are transcribed but not translated into amino acids (also referred to as 5′ and 3′ untranslated regions).

[0101] Antisense nucleic acid sequences can be designed according to the rules of Watson and Crick base pairing. The antisense nucleic acid sequence may be complementary to the entire nucleic acid sequence (in this case a stretch of substantially contiguous nucleotides derived from the gene of interest, or from any nucleic acid capable of encoding an orthologue, paralogue or homologue of the protein of interest), but may also be an oligonucleotide that is antisense to only a part of the nucleic acid sequence (including the mRNA 5′ and 3′ UTR). For example, the antisense oligonucleotide sequence may be complementary to the region surrounding the translation start site of an mRNA transcript encoding a polypeptide. The length of a suitable antisense oligonucleotide sequence is known in the art and may start from about 50, 45, 40, 35, 30, 25, 20, 15 or 10 nucleotides in length or less. An antisense nucleic acid sequence according to the invention may be constructed using chemical synthesis and enzymatic ligation reactions using methods known in the art. For example, an antisense nucleic acid sequence (e.g., an antisense oligonucleotide sequence) may be chemically synthesized using naturally occurring nucleotides or variously modified nucleotides designed to increase the biological stability of the molecules or to increase the physical stability of the duplex formed between the antisense and sense nucleic acid sequences, e.g., phosphorothioate derivatives and acridine substituted nucleotides may be used. Examples of modified nucleotides that may be used to generate the antisense nucleic acid sequences are well known in the art. Known nucleotide modifications include methylation, cyclization and ‘caps’ and substitution of one or more of the naturally occurring nucleotides with an analogue such as inosine. Other modifications of nucleotides are well known in the art.

[0102] The antisense nucleic acid sequence can be produced biologically using an expression vector into which a nucleic acid sequence has been subcloned in an antisense orientation (i.e., RNA transcribed from the inserted nucleic acid will be of an antisense orientation to a target nucleic acid of interest). Preferably, production of antisense nucleic acid sequences in plants occurs by means of a stably integrated nucleic acid construct comprising a promoter, an operably linked antisense oligonucleotide, and a terminator.

[0103] The nucleic acid molecules used for silencing in the methods of the invention (whether introduced into a plant or generated in situ) hybridize with or bind to mRNA transcripts and/or genomic DNA encoding a polypeptide to thereby inhibit expression of the protein, e.g., by inhibiting transcription and/or translation. The hybridization can be by conventional nucleotide complementarity to form a stable duplex, or, for example, in the case of an antisense nucleic acid sequence which binds to DNA duplexes, through specific interactions in the major groove of the double helix. Antisense nucleic acid sequences may be introduced into a plant by transformation or direct injection at a specific tissue site. Alternatively, antisense nucleic acid sequences can be modified to target selected cells and then administered systemically. For example, for systemic administration, antisense nucleic acid sequences can be modified such that they specifically bind to receptors or antigens expressed on a selected cell surface, e.g., by linking the antisense nucleic acid sequence to peptides or antibodies which bind to cell surface receptors or antigens. The antisense nucleic acid sequences can also be delivered to cells using the vectors described herein.

[0104] According to a further aspect, the antisense nucleic acid sequence is an a-anomeric nucleic acid sequence. An a-anomeric nucleic acid sequence forms specific double-stranded hybrids with complementary RNA in which, contrary to the usual b-units, the strands run parallel to each other (Gaultier et al. (1987) Nucl Ac Res 15: 6625-6641). The antisense nucleic acid sequence may also comprise a 2′-o-methylribonucleotide (Inoue et al. (1987) Nucl Ac Res 15, 6131-6148) or a chimeric RNA-DNA analogue (Inoue et al. (1987) FEBS Lett. 215, 327-330).

[0105] The reduction or substantial elimination of endogenous gene expression may also be performed using ribozymes. Ribozymes are catalytic RNA molecules with ribonuclease activity that are capable of cleaving a single-stranded nucleic acid sequence, such as an mRNA, to which they have a complementary region. Thus, ribozymes (e.g., hammerhead ribozymes (described in Haselhoff and Gerlach (1988) Nature 334, 585-591) can be used to catalytically cleave mRNA transcripts encoding a polypeptide, thereby substantially reducing the number of mRNA transcripts to be translated into a polypeptide. A ribozyme having specificity for a nucleic acid sequence can be designed (see for example: Cech et al. U.S. Pat. No. 4,987,071; and Cech et al. U.S. Pat. No. 5,116,742). Alternatively, mRNA transcripts corresponding to a nucleic acid sequence can be used to select a catalytic RNA having a specific ribonuclease activity from a pool of RNA molecules (Bartel and Szostak (1993) Science 261, 1411-1418). The use of ribozymes for gene silencing in plants is known in the art (e.g., Atkins et al. (1994) WO 94/00012; Lenne et al. (1995) WO 95/03404; Lutziger et al. (2000) WO 00/00619; Prinsen et al. (1997) WO 97/13865 and Scott et al. (1997) WO 97/38116).

[0106] Gene silencing may also be achieved by insertion mutagenesis (for example, T-DNA insertion or transposon insertion) or by strategies as described by, among others, Angell and Baulcombe ((1999) Plant J 20(3): 357-62), (Amplicon VIGS WO 98/36083), or Baulcombe (WO 99/15682).

[0107] Gene silencing may also occur if there is a mutation on an endogenous gene and/or a mutation on an isolated gene/nucleic acid subsequently introduced into a plant. The reduction or substantial elimination may be caused by a non-functional polypeptide. For example, the polypeptide may bind to various interacting proteins; one or more mutation(s) and/or truncation(s) may therefore provide for a polypeptide that is still able to bind interacting proteins (such as receptor proteins) but that cannot exhibit its normal function (such as signalling ligand).

[0108] A further approach to gene silencing is by targeting nucleic acid sequences complementary to the regulatory region of the gene (e.g., the promoter and/or enhancers) to form triple helical structures that prevent transcription of the gene in target cells. See Helene, C., Anticancer Drug Res. 6, 569-84, 1991; Helene et al., Ann. N.Y. Acad. Sci. 660, 27-36 1992; and Maher, L. J. Bioassays 14, 807-15, 1992.

[0109] Other methods, such as the use of antibodies directed to an endogenous polypeptide for inhibiting its function in planta, or interference in the signalling pathway in which a polypeptide is involved, will be well known to the skilled man. In particular, it can be envisaged that manmade molecules may be useful for inhibiting the biological function of a target polypeptide, or for interfering with the signalling pathway in which the target polypeptide is involved.

[0110] Alternatively, a screening program may be set up to identify in a plant population natural variants of a gene, which variants encode polypeptides with reduced activity. Such natural variants may also be used for example, to perform homologous recombination.

[0111] Artificial and/or natural microRNAs (miRNAs) may be used to knock out gene expression and/or mRNA translation. Endogenous miRNAs are single stranded small RNAs of typically 19-24 nucleotides long. They function primarily to regulate gene expression and/or mRNA translation. Most plant microRNAs (miRNAs) have perfect or near-perfect complementarity with their target sequences. However, there are natural targets with up to five mismatches. They are processed from longer non-coding RNAs with characteristic fold-back structures by double-strand specific RNases of the Dicer family. Upon processing, they are incorporated in the RNA-induced silencing complex (RISC) by binding to its main component, an Argonaute protein. MiRNAs serve as the specificity components of RISC, since they base-pair to target nucleic acids, mostly mRNAs, in the cytoplasm. Subsequent regulatory events include target mRNA cleavage and destruction and/or translational inhibition. Effects of miRNA overexpression are thus often reflected in decreased mRNA levels of target genes.

[0112] Artificial microRNAs (amiRNAs), which are typically 21 nucleotides in length, can be genetically engineered specifically to negatively regulate gene expression of single or multiple genes of interest. Determinants of plant microRNA target selection are well known in the art. Empirical parameters for target recognition have been defined and can be used to aid in the design of specific amiRNAs, (Schwab et al., Dev. Cell 8, 517-527, 2005). Convenient tools for design and generation of amiRNAs and their precursors are also available to the public (Schwab et al., Plant Cell 18, 1121-1133, 2006).

[0113] For optimal performance, the gene silencing techniques used for reducing expression in a plant of an endogenous gene requires the use of nucleic acid sequences from monocotyledonous plants for transformation of monocotyledonous plants, and from dicotyledonous plants for transformation of dicotyledonous plants. Preferably, a nucleic acid sequence from any given plant species is introduced into that same species. For example, a nucleic acid sequence from rice is transformed into a rice plant. However, it is not an absolute requirement that the nucleic acid sequence to be introduced originates from the same plant species as the plant in which it will be introduced. It is sufficient that there is substantial homology between the endogenous target gene and the nucleic acid to be introduced.

[0114] Described above are examples of various methods for the reduction or substantial elimination of expression in a plant of an endogenous gene. A person skilled in the art would readily be able to adapt the aforementioned methods for silencing so as to achieve reduction of expression of an endogenous gene in a whole plant or in parts thereof through the use of an appropriate promoter, for example.

### Transformation

[0115] The term “introduction” or “transformation” as referred to herein encompasses the transfer of an exogenous polynucleotide into a host cell, irrespective of the method used for transfer. Plant tissue capable of subsequent clonal propagation, whether by organogenesis or embryogenesis, may be transformed with a genetic construct of the present invention and a whole plant regenerated there from. The particular tissue chosen will vary depending on the clonal propagation systems available for, and best suited to, the particular species being transformed. Exemplary tissue targets include leaf disks, pollen, embryos, cotyledons, hypocotyls, megagametophytes, callus tissue, existing meristematic tissue (e.g., apical meristem, axillary buds, and root meristems), and induced meristem tissue (e.g., cotyledon meristem and hypocotyl meristem). The polynucleotide may be transiently or stably introduced into a host cell and may be maintained non-integrated, for example, as a plasmid. Alternatively, it may be integrated into the host genome. The resulting transformed plant cell may then be used to regenerate a transformed plant in a manner known to persons skilled in the art.

[0116] The transfer of foreign genes into the genome of a plant is called transformation. Transformation of plant species is now a fairly routine technique. Advantageously, any of several transformation methods may be used to introduce the gene of interest into a suitable ancestor cell. The methods described for the transformation and regeneration of plants from plant tissues or plant cells may be utilized for transient or for stable transformation. Transformation methods include the use of liposomes, electroporation, chemicals that increase free DNA uptake, injection of the DNA directly into the plant, particle gun bombardment, transformation using viruses or pollen and microprojection. Methods may be selected from the calcium/polyethylene glycol method for protoplasts (Krens, F. A. et al., (1982) Nature 296, 72-74; Negrutiu I et al. (1987) Plant Mol Biol 8: 363-373); electroporation of protoplasts (Shillito R. D. et al. (1985) Bio/Technol 3, 1099-1102); microinjection into plant material (Crossway A et al., (1986) Mol. Gen Genet 202: 179-185); DNA or RNA-coated particle bombardment (Klein T M et al., (1987) Nature 327: 70) infection with (non-integrative) viruses and the like. Transgenic plants, including transgenic crop plants, are preferably produced via Agrobacterium-mediated transformation. An advantageous transformation method is the transformation in planta. To this end, it is possible, for example, to allow the agrobacteria to act on plant seeds or to inoculate the plant meristem with agrobacteria. It has proved particularly expedient in accordance with the invention to allow a suspension of transformed agrobacteria to act on the intact plant or at least on the flower primordia. The plant is subsequently grown on until the seeds of the treated plant are obtained (Clough and Bent, Plant J. (1998) 16, 735-743). Methods for Agrobacterium-mediated transformation of rice include well known methods for rice transformation, such as those described in any of the following: European patent application EP 1198985 A1, Aldemita and Hodges (Planta 199: 612-617, 1996); Chan et al. (Plant Mol Biol 22 (3): 491-506, 1993), Hiei et al. (Plant J 6 (2): 271-282, 1994), which disclosures are incorporated by reference herein as if fully set forth. In the case of corn transformation, the preferred method is as described in either Ishida et al. (Nat. Biotechnol 14(6): 745-50, 1996) or Frame et al. (Plant Physiol 129(1): 13-22, 2002), which disclosures are incorporated by reference herein as if fully set forth. Said methods are further described by way of example in B. Jenes et al., Techniques for Gene Transfer, in: Transgenic Plants, Vol. 1, Engineering and Utilization, eds. S. D. Kung and R. Wu, Academic Press (1993) 128-143 and in Potrykus Annu. Rev. Plant Physiol. Plant Molec. Biol. 42 (1991) 205-225). The nucleic acids or the construct to be expressed is preferably cloned into a vector, which is suitable for transforming Agrobacterium tumefaciens, for example pBin19 (Bevan et al., Nucl. Acids Res. 12 (1984) 8711). Agrobacteria transformed by such a vector can then be used in known manner for the transformation of plants, such as plants used as a model, like Arabidopsis (Arabidopsis thaliana is within the scope of the present invention not considered as a crop plant), or crop plants such as, by way of example, tobacco plants, for example by immersing bruised leaves or chopped leaves in an agrobacterial solution and then culturing them in suitable media. The transformation of plants by means of Agrobacterium tumefaciens is described, for example, by Höfgen and Willmitzer in Nucl. Acid Res. (1988) 16, 9877 or is known inter alia from F. F. White, Vectors for Gene Transfer in Higher Plants; in Transgenic Plants, Vol. 1, Engineering and Utilization, eds. S. D. Kung and R. Wu, Academic Press, 1993, pp. 15-38.

[0117] In addition to the transformation of somatic cells, which then have to be regenerated into intact plants, it is also possible to transform the cells of plant meristems and in particular those cells which develop into gametes. In this case, the transformed gametes follow the natural plant development, giving rise to transgenic plants. Thus, for example, seeds of Arabidopsis are treated with agrobacteria and seeds are obtained from the developing plants of which a certain proportion is transformed and thus transgenic [Feldman, K A and Marks M D (1987). Mol Gen Genet 208:274-289; Mol Gen Genet 208:1-9; Feldmann K (1992). In: C Koncz, N-H Chua and J Shell, eds, Methods in Arabidopsis Research. Word Scientific, Singapore, pp. 274-289]. Alternative methods are based on the repeated removal of the inflorescences and incubation of the excision site in the center of the rosette with transformed agrobacteria, whereby transformed seeds can likewise be obtained at a later point in time (Chang (1994). Plant J. 5: 551-558; Katavic (1994). Mol Gen Genet, 245: 363-370). However, an especially effective method is the vacuum infiltration method with its modifications such as the “floral dip” method. In the case of vacuum infiltration of Arabidopsis, intact plants under reduced pressure are treated with an agrobacterial suspension [Bechthold, N (1993). C R Acad Sci Paris Life Sci, 316: 1194-1199], while in the case of the “floral dip” method the developing floral tissue is incubated briefly with a surfactant-treated agrobacterial suspension [Clough, S J and Bent A F (1998) The Plant J. 16, 735-743]. A certain proportion of transgenic seeds are harvested in both cases, and these seeds can be distinguished from non-transgenic seeds by growing under the above-described selective conditions. In addition the stable transformation of plastids is of advantages because plastids are inherited maternally is most crops reducing or eliminating the risk of transgene flow through pollen. The transformation of the chloroplast genome is generally achieved by a process which has been schematically displayed in Klaus et al., 2004 [Nature Biotechnology 22 (2), 225-229]. Briefly the sequences to be transformed are cloned together with a selectable marker gene between flanking sequences homologous to the chloroplast genome. These homologous flanking sequences direct site specific integration into the plastome. Plastidal transformation has been described for many different plant species and an overview is given in Bock (2001) Transgenic plastids in basic research and plant biotechnology. J Mol Biol. 2001 Sep. 21; 312 (3):425-38 or Maliga, P (2003) Progress towards commercialization of plastid transformation technology. Trends Biotechnol. 21, 20-28. Further biotechnological progress has recently been reported in form of marker free plastid transformants, which can be produced by a transient co-integrated maker gene (Klaus et al., 2004, Nature Biotechnology 22(2), 225-229).

[0118] The genetically modified plant cells can be regenerated via all methods with which the skilled worker is familiar. Suitable methods can be found in the abovementioned publications by S. D. Kung and R. Wu, Potrykus or Hofgen and Willmitzer.

[0119] Generally after transformation, plant cells or cell groupings are selected for the presence of one or more markers which are encoded by plant-expressible genes co-transferred with the gene of interest, following which the transformed material is regenerated into a whole plant. To select transformed plants, the plant material obtained in the transformation is, as a rule, subjected to selective conditions so that transformed plants can be distinguished from untransformed plants. For example, the seeds obtained in the above-described manner can be planted and, after an initial growing period, subjected to a suitable selection by spraying. A further possibility consists in growing the seeds, if appropriate after sterilization, on agar plates using a suitable selection agent so that only the transformed seeds can grow into plants. Alternatively, the transformed plants are screened for the presence of a selectable marker such as the ones described above.

[0120] Following DNA transfer and regeneration, putatively transformed plants may also be evaluated, for instance using Southern analysis, for the presence of the gene of interest, copy number and/or genomic organisation. Alternatively or additionally, expression levels of the newly introduced DNA may be monitored using Northern and/or Western analysis, both techniques being well known to persons having ordinary skill in the art.

[0121] The generated transformed plants may be propagated by a variety of means, such as by clonal propagation or classical breeding techniques. For example, a first generation (or T1) transformed plant may be selfed and homozygous second-generation (or T2) transformants selected, and the T2 plants may then further be propagated through classical breeding techniques. The generated transformed organisms may take a variety of forms. For example, they may be chimeras of transformed cells and non-transformed cells; clonal transformants (e.g., all cells transformed to contain the expression cassette); grafts of transformed and untransformed tissues (e.g., in plants, a transformed rootstock grafted to an untransformed scion).

### T-DNA Activation Tagging

[0122] T-DNA activation tagging (Hayashi et al. Science (1992) 1350-1353), involves insertion of T-DNA, usually containing a promoter (may also be a translation enhancer or an intron), in the genomic region of the gene of interest or 10 kb up- or downstream of the coding region of a gene in a configuration such that the promoter directs expression of the targeted gene. Typically, regulation of expression of the targeted gene by its natural promoter is disrupted and the gene falls under the control of the newly introduced promoter. The promoter is typically embedded in a T-DNA. This T-DNA is randomly inserted into the plant genome, for example, through Agrobacterium infection and leads to modified expression of genes near the inserted T-DNA. The resulting transgenic plants show dominant phenotypes due to modified expression of genes close to the introduced promoter.

### TILLING

[0123] The term “TILLING” is an abbreviation of “Targeted Induced Local Lesions In Genomes” and refers to a mutagenesis technology useful to generate and/or identify nucleic acids encoding proteins with modified expression and/or activity. TILLING also allows selection of plants carrying such mutant variants. These mutant variants may exhibit modified expression, either in strength or in location or in timing (if the mutations affect the promoter for example). These mutant variants may exhibit higher activity than that exhibited by the gene in its natural form. TILLING combines high-density mutagenesis with high-throughput screening methods. The steps typically followed in TILLING are: (a) EMS mutagenesis (Redei G P and Koncz C (1992) In Methods in Arabidopsis Research, Koncz C, Chua N H, Schell J, eds. Singapore, World Scientific Publishing Co, pp. 16-82; Feldmann et al., (1994) In Meyerowitz E M, Somerville C R, eds, Arabidopsis. Cold Spring Harbor Laboratory Press, Cold Spring Harbor, N.Y., pp 137-172; Lightner J and Caspar T (1998) In J Martinez-Zapater, J Salinas, eds, Methods on Molecular Biology, Vol. 82. Humana Press, Totowa, N.J., pp 91-104); (b) DNA preparation and pooling of individuals; (c) PCR amplification of a region of interest; (d) denaturation and annealing to allow formation of heteroduplexes; (e) DHPLC, where the presence of a heteroduplex in a pool is detected as an extra peak in the chromatogram; (f) identification of the mutant individual; and (g) sequencing of the mutant PCR product. Methods for TILLING are well known in the art (McCallum et al., (2000) Nat Biotechnol 18: 455-457; reviewed by Stemple (2004) Nat Rev Genet 5(2): 145-50).

### Homologous Recombination

[0124] Homologous recombination allows introduction in a genome of a selected nucleic acid at a defined selected position. Homologous recombination is a standard technology used routinely in biological sciences for lower organisms such as yeast or the moss Physcomilrella. Methods for performing homologous recombination in plants have been described not only for model plants (Offringa et al. (1990) EMBO J 9(10): 3077-84) but also for crop plants, for example rice (Terada et al. (2002) Nat Biotech 20(10): 1030-4; lida and Terada (2004) Curr Opin Biotech 15(2): 132-8), and approaches exist that are generally applicable regardless of the target organism (Miller et al, Nature Biotechnol. 25, 778-785, 2007).

### Yield Related Traits

[0125] Yield related traits are traits or features which are related to plant yield. Yield related traits may comprise one or more of the following non-limitative list of features: early flowering time, yield, biomass, seed yield, early vigour, greenness index, increased growth rate, improved agronomic traits (such as increased tolerance to submergence (which leads to increased yield in rice), improved Water Use Efficiency (WUE), Nitrogen Use Efficiency (NUE), etc.).

### Yield

[0126] The term “yield” in general means a measurable produce of economic value, typically related to a specified crop, to an area, and to a period of time. Individual plant parts directly contribute to yield based on their number, size and/or weight, or the actual yield is the yield per square meter for a crop and year, which is determined by dividing total production (includes both harvested and appraised production) by planted square meters.

[0127] The terms “yield” of a plant or “plant yield” are used interchangeably herein may relate to vegetative biomass (root and/or shoot biomass), to reproductive organs, and/or to propagules (such as seeds) of that plant.

[0128] Taking corn as an example, a yield increase may be manifested as one or more of the following: increase in the number of plants established per square meter, an increase in the number of ears per plant, an increase in the number of rows, number of kernels per row, kernel weight, thousand kernel weight, ear length/diameter, increase in the seed filling rate (which is the number of filled seeds divided by the total number of seeds and multiplied by 100), among others. Taking rice as an example, a yield increase may manifest itself as an increase in one or more of the following: number of plants per square meter, number of panicles per plant, panicle length, number of spikelets per panicle, number of flowers (florets) per panicle, increase in the seed filling rate (which is the number of filled seeds divided by the total number of seeds and multiplied by 100), increase in thousand kernel weight, among others. In rice, submergence tolerance may also result in increased yield.

[0129] Flowers in maize are unisexual; male inflorescences (tassels) originate from the apical stem and female inflorescences (ears) arise from axillary bud apices. The female inflorescence produces pairs of spikelets on the surface of a central axis (cob). Each of the female spikelets encloses two fertile florets, one of them will usually mature into a maize kernel once fertilized. Hence a yield increase in maize may be manifested as one or more of the following: increase in the number of plants established per square meter, an increase in the number of ears per plant, an increase in the number of rows, number of kernels per row, kernel weight, thousand kernel weight, ear length/diameter, increase in the seed filling rate, which is the number of filled florets (i.e. florets containing seed) divided by the total number of florets and multiplied by 100), among others.

[0130] Inflorescences in rice plants are named panicles. The panicle bears spikelets, which are the basic units of the panicles, and which consist of a pedicel and a floret. The floret is borne on the pedicel and includes a flower that is covered by two protective glumes: a larger glume (the lemma) and a shorter glume (the palea). Hence, taking rice as an example, a yield increase may manifest itself as an increase in one or more of the following: number of plants per square meter, number of panicles per plant, panicle length, number of spikelets per panicle, number of flowers (or florets) per panicle; an increase in the seed filling rate which is the number of filled florets (i.e. florets containing seeds) divided by the total number of florets and multiplied by 100; an increase in thousand kernel weight, among others.

### Early Flowering Time

[0131] Plants having an “early flowering time” as used herein are plants which start to flower earlier than control plants. Hence this term refers to plants that show an earlier start of flowering. Flowering time of plants can be assessed by counting the number of days (“time to flower”) between sowing and the emergence of a first inflorescence. The “flowering time” of a plant can for instance be determined using the method as described in WO 2007/093444.

### Early Vigour

[0132] “Early vigour” refers to active healthy well-balanced growth especially during early stages of plant growth, and may result from increased plant fitness due to, for example, the plants being better adapted to their environment (i.e. optimizing the use of energy resources and partitioning between shoot and root). Plants having early vigour also show increased seedling survival and a better establishment of the crop, which often results in highly uniform fields (with the crop growing in uniform manner, i.e. with the majority of plants reaching the various stages of development at substantially the same time), and often better and higher yield. Therefore, early vigour may be determined by measuring various factors, such as thousand kernel weight, percentage germination, percentage emergence, seedling growth, seedling height, root length, root and shoot biomass and many more.

### Increased Growth Rate

[0133] The increased growth rate may be specific to one or more parts of a plant (including seeds), or may be throughout substantially the whole plant. Plants having an increased growth rate may have a shorter life cycle. The life cycle of a plant may be taken to mean the time needed to grow from a dry mature seed up to the stage where the plant has produced dry mature seeds, similar to the starting material. This life cycle may be influenced by factors such as speed of germination, early vigour, growth rate, greenness index, flowering time and speed of seed maturation. The increase in growth rate may take place at one or more stages in the life cycle of a plant or during substantially the whole plant life cycle. Increased growth rate during the early stages in the life cycle of a plant may reflect enhanced vigour. The increase in growth rate may alter the harvest cycle of a plant allowing plants to be sown later and/or harvested sooner than would otherwise be possible (a similar effect may be obtained with earlier flowering time). If the growth rate is sufficiently increased, it may allow for the further sowing of seeds of the same plant species (for example sowing and harvesting of rice plants followed by sowing and harvesting of further rice plants all within one conventional growing period). Similarly, if the growth rate is sufficiently increased, it may allow for the further sowing of seeds of different plants species (for example the sowing and harvesting of corn plants followed by, for example, the sowing and optional harvesting of soybean, potato or any other suitable plant). Harvesting additional times from the same rootstock in the case of some crop plants may also be possible. Altering the harvest cycle of a plant may lead to an increase in annual biomass production per square meter (due to an increase in the number of times (say in a year) that any particular plant may be grown and harvested). An increase in growth rate may also allow for the cultivation of transgenic plants in a wider geographical area than their wild-type counterparts, since the territorial limitations for growing a crop are often determined by adverse environmental conditions either at the time of planting (early season) or at the time of harvesting (late season). Such adverse conditions may be avoided if the harvest cycle is shortened. The growth rate may be determined by deriving various parameters from growth curves, such parameters may be: T-Mid (the time taken for plants to reach 50% of their maximal size) and T-90 (time taken for plants to reach 90% of their maximal size), amongst others.

### Stress Resistance

[0134] An increase in yield and/or growth rate occurs whether the plant is under non-stress conditions or whether the plant is exposed to various stresses compared to control plants. Plants typically respond to exposure to stress by growing more slowly. In conditions of severe stress, the plant may even stop growing altogether. Mild stress on the other hand is defined herein as being any stress to which a plant is exposed which does not result in the plant ceasing to grow altogether without the capacity to resume growth. Mild stress in the sense of the invention leads to a reduction in the growth of the stressed plants of less than 40%, 35%, 30% or 25%, more preferably less than 20% or 15% in comparison to the control plant under non-stress conditions. Due to advances in agricultural practices (irrigation, fertilization, pesticide treatments) severe stresses are not often encountered in cultivated crop plants. As a consequence, the compromised growth induced by mild stress is often an undesirable feature for agriculture. Mild stresses are the everyday biotic and/or abiotic (environmental) stresses to which a plant is exposed. Abiotic stresses may be due to drought or excess water, anaerobic stress, salt stress, chemical toxicity, oxidative stress and hot, cold or freezing temperatures.

[0135] “Biotic stresses” are typically those stresses caused by pathogens, such as bacteria, viruses, fungi, nematodes and insects.

[0136] The abiotic stress may be an osmotic stress caused by a water stress (particularly due to drought), salt stress, oxidative stress, an ionic stress or freezing stress. Abiotic stress may also be an oxidative stress or a cold stress. “Freezing stress” is intended to refer to stress due to freezing temperatures, i.e. temperatures at which available water molecules freeze and turn into ice. “Cold stress”, also called “chilling stress”, is intended to refer to cold temperatures, e.g. temperatures below 10°, or preferably below 5° C., but at which water molecules do not freeze. Biotic stresses are typically those stresses caused by pathogens, such as bacteria, viruses, fungi, nematodes and insects.

[0137] As reported in Wang et al. (Planta (2003) 218: 1-14), abiotic stress leads to a series of morphological, physiological, biochemical and molecular changes that adversely affect plant growth and productivity. Drought, salinity, extreme temperatures and oxidative stress are known to be interconnected and may induce growth and cellular damage through similar mechanisms. Rabbani et al. (Plant Physiol (2003) 133: 1755-1767) describes a particularly high degree of “cross talk” between drought stress and high-salinity stress. For example, drought and/or salinisation are manifested primarily as osmotic stress, resulting in the disruption of homeostasis and ion distribution in the cell. Oxidative stress, which frequently accompanies high or low temperature, salinity or drought stress, may cause denaturing of functional and structural proteins. As a consequence, these diverse environmental stresses often activate similar cell signalling pathways and cellular responses, such as the production of stress proteins, up-regulation of anti-oxidants, accumulation of compatible solutes and growth arrest. The term “non-stress” conditions as used herein are those environmental conditions that allow optimal growth of plants. Persons skilled in the art are aware of normal soil conditions and climatic conditions for a given location. Plants with optimal growth conditions, (grown under non-stress conditions) typically yield in increasing order of preference at least 97%, 95%, 92%, 90%, 87%, 85%, 83%, 80%, 77% or 75% of the average production of such plant in a given environment. Average production may be calculated on harvest and/or season basis. Persons skilled in the art are aware of average yield productions of a crop.

[0138] In particular, the methods of the present invention may be performed under non-stress conditions. In an example, the methods of the present invention may be performed under non-stress conditions such as mild drought to give plants having increased yield relative to control plants.

[0139] In another embodiment, the methods of the present invention may be performed under stress conditions.

[0140] In an example, the methods of the present invention may be performed under stress conditions such as drought to give plants having increased yield relative to control plants.

[0141] In another example, the methods of the present invention may be performed under stress conditions such as nutrient deficiency to give plants having increased yield relative to control plants.

[0142] Nutrient deficiency may result from a lack of nutrients such as nitrogen, phosphates and other phosphorous-containing compounds, potassium, calcium, magnesium, manganese, iron and boron, amongst others.

[0143] In yet another example, the methods of the present invention may be performed under stress conditions such as salt stress to give plants having increased yield relative to control plants. The term salt stress is not restricted to common salt (NaCl), but may be any one or more of: NaCl, KCl, LiCl, MgCl₂, CaCl₂, amongst others.

[0144] In yet another example, the methods of the present invention may be performed under stress conditions such as cold stress or freezing stress to give plants having increased yield relative to control plants.

### Increase/Improve/Enhance

[0145] The terms “increase”, “improve” or “enhance” are interchangeable and shall mean in the sense of the application at least a 3%, 4%, 5%, 6%, 7%, 8%, 9% or 10%, preferably at least 15% or 20%, more preferably 25%, 30%, 35% or 40% more yield and/or growth in comparison to control plants as defined herein.

### Seed Yield

[0146] Increased seed yield may manifest itself as one or more of the following:
[0147] a) an increase in seed biomass (total seed weight) which may be on an individual seed basis and/or per plant and/or per square meter;
[0148] b) increased number of flowers per plant;
[0149] c) increased number of seeds and/or increased number of (filled) seeds;
[0150] d) increased seed filling rate (which is expressed as the ratio between the number of filled seeds divided by the total number of seeds);
[0151] e) increased harvest index, which is expressed as a ratio of the yield of harvestable parts, such as seeds, divided by the total biomass; and
[0152] f) increased thousand kernel weight (TKW), which is extrapolated from the number of filled seeds counted and their total weight. An increased TKW may result from an increased seed size and/or seed weight, and may also result from an increase in embryo and/or endosperm size.

[0153] The terms “filled florets” and “filled seeds” may be considered synonyms.

[0154] An increase in seed yield may also be manifested as an increase in seed size and/or seed volume. Furthermore, an increase in seed yield may also manifest itself as an increase in seed area and/or seed length and/or seed width and/or seed perimeter. Increased yield may also result in modified architecture, or may occur because of modified architecture.

### Greenness Index

[0155] The “greenness index” as used herein is calculated from digital images of plants. For each pixel belonging to the plant object on the image, the ratio of the green value versus the red value (in the RGB model for encoding color) is calculated. The greenness index is expressed as the percentage of pixels for which the green-to-red ratio exceeds a given threshold. Under normal growth conditions, under salt stress growth conditions, and under reduced nutrient availability growth conditions, the greenness index of plants is measured in the last imaging before flowering. In contrast, under drought stress growth conditions, the greenness index of plants is measured in the first imaging after drought.

### Biomass

[0156] The term “biomass” as used herein is intended to refer to the total weight of a plant. Within the definition of biomass, a distinction may be made between the biomass of one or more parts of a plant, which may include any one or more of:
[0157] aboveground (harvestable) parts such as but not limited to shoot biomass, seed biomass, leaf biomass, etc.;
[0158] (harvestable) parts below ground, such as but not limited to root biomass, tubers, bulbs, etc.;
[0159] vegetative biomass such as root biomass, shoot biomass, etc.;
[0160] reproductive organs;
[0161] propagules such as seed.

### Marker Assisted Breeding

[0162] Such breeding programmes sometimes require introduction of allelic variation by mutagenic treatment of the plants, using for example EMS mutagenesis; alternatively, the programme may start with a collection of allelic variants of so called “natural” origin caused unintentionally. Identification of allelic variants then takes place, for example, by PCR. This is followed by a step for selection of superior allelic variants of the sequence in question and which give increased yield. Selection is typically carried out by monitoring growth performance of plants containing different allelic variants of the sequence in question. Growth performance may be monitored in a greenhouse or in the field. Further optional steps include crossing plants in which the superior allelic variant was identified with another plant. This could be used, for example, to make a combination of interesting phenotypic features.

### Use as Probes in (Gene Mapping)

[0163] Use of nucleic acids encoding the protein of interest for genetically and physically mapping the genes requires only a nucleic acid sequence of at least 15 nucleotides in length. These nucleic acids may be used as restriction fragment length polymorphism (RFLP) markers. Southern blots (Sambrook J, Fritsch E F and Maniatis T (1989) Molecular Cloning, A Laboratory Manual) of restriction-digested plant genomic DNA may be probed with the nucleic acids encoding the protein of interest. The resulting banding patterns may then be subjected to genetic analyses using computer programs such as MapMaker (Lander et al. (1987) Genomics 1: 174-181) in order to construct a genetic map. In addition, the nucleic acids may be used to probe Southern blots containing restriction endonuclease-treated genomic DNAs of a set of individuals representing parent and progeny of a defined genetic cross. Segregation of the DNA polymorphisms is noted and used to calculate the position of the nucleic acid encoding the protein of interest in the genetic map previously obtained using this population (Botstein et al. (1980) Am. J. Hum. Genet. 32:314-331).

[0164] The production and use of plant gene-derived probes for use in genetic mapping is described in Bernatzky and Tanksley (1986) Plant Mol. Biol. Reporter 4: 37-41. Numerous publications describe genetic mapping of specific cDNA clones using the methodology outlined above or variations thereof. For example, F2 intercross populations, backcross populations, randomly mated populations, near isogenic lines, and other sets of individuals may be used for mapping. Such methodologies are well known to those skilled in the art.

[0165] The nucleic acid probes may also be used for physical mapping (i.e., placement of sequences on physical maps; see Hoheisel et al. In: Non-mammalian Genomic Analysis: A Practical Guide, Academic press 1996, pp. 319-346, and references cited therein).

[0166] In another embodiment, the nucleic acid probes may be used in direct fluorescence in situ hybridisation (FISH) mapping (Trask (1991) Trends Genet. 7:149-154). Although current methods of FISH mapping favour use of large clones (several kb to several hundred kb; see Laan et al. (1995) Genome Res. 5:13-20), improvements in sensitivity may allow performance of FISH mapping using shorter probes.

[0167] A variety of nucleic acid amplification-based methods for genetic and physical mapping may be carried out using the nucleic acids. Examples include allele-specific amplification (Kazazian (1989) J. Lab. Clin. Med 11:95-96), polymorphism of PCR-amplified fragments (CAPS; Sheffield et al. (1993) Genomics 16:325-332), allele-specific ligation (Landegren et al. (1988) Science 241:1077-1080), nucleotide extension reactions (Sokolov (1990) Nucleic Acid Res. 18:3671), Radiation Hybrid Mapping (Walter et al. (1997) Nat. Genet. 7:22-28) and Happy Mapping (Dear and Cook (1989) Nucleic Acid Res. 17:6795-6807). For these methods, the sequence of a nucleic acid is used to design and produce primer pairs for use in the amplification reaction or in primer extension reactions. The design of such primers is well known to those skilled in the art. In methods employing PCR-based genetic mapping, it may be necessary to identify DNA sequence differences between the parents of the mapping cross in the region corresponding to the instant nucleic acid sequence. This, however, is generally not necessary for mapping methods.

### Plant

[0168] The term “plant” as used herein encompasses whole plants, ancestors and progeny of the plants and plant parts, including seeds, shoots, stems, leaves, roots (including tubers), flowers, and tissues and organs, wherein each of the aforementioned comprise the gene/nucleic acid of interest. The term “plant” also encompasses plant cells, suspension cultures, callus tissue, embryos, meristematic regions, gametophytes, sporophytes, pollen and microspores, again wherein each of the aforementioned comprises the gene/nucleic acid of interest.

[0169] Plants that are particularly useful in the methods of the invention include all plants which belong to the superfamily Viridiplantae, in particular monocotyledonous and dicotyledonous plants including fodder or forage legumes, ornamental plants, food crops, trees or shrubs selected from the list comprising Acer spp., Actinidia spp., Abelmoschus spp., Agave sisalana, Agropyron spp., Agrostis stolonifera, Allium spp., Amaranthus spp., Ammophila arenaria, Ananas comosus, Annona spp., Apium graveolens, Arachis spp, Artocarpus spp., Asparagus officinalis, Avena spp. (e.g. Avena sativa, Avena fatua, Avena byzantina, Avena fatua var. sativa, Avena hybrida), Averrhoa carambola, Bambusa sp., Benincasa hispida, Bertholletia excelsea, Beta vulgaris, Brassica spp. (e.g. Brassica napus, Brassica raga ssp. [canola, oilseed rape, turnip rape]), Cadaba farinosa, Camellia sinensis, Canna indica, Cannabis sativa, Capsicum spp., Carex elata, Carica papaya, Carissa macrocarpa, Carya spp., Carthamus tinctorius, Castanea spp., Ceiba pentandra, Cichorium endivia, Cinnamomum spp., Citrullus lanatus, Citrus spp., Cocos spp., Coffea spp., Colocasia esculenta, Cola spp., Corchorus sp., Coriandrum sativum, Corylus spp., Crataegus spp., Crocus sativus, Cucurbita spp., Cucumis spp., Cynara spp., Daucus carota, Desmodium spp., Dimocarpus longan, Dioscorea spp., Diospyros spp., Echinochloa spp., Elaeis (e.g. Elaeis guineensis, Elaeis oleifera), Eleusine coracana, Eragrostis tef, Erianthus sp., Eriobotrya japonica, Eucalyptus sp., Eugenia uniflora, Fagopyrum spp., Fagus spp., Festuca arundinacea, Ficus carica, Fortunella spp., Fragaria spp., Ginkgo biloba, Glycine spp. (e.g. Glycine max, Soja hispida or Soja max), Gossypium hirsutum, Helianthus spp. (e.g. Helianthus annuus), Hemerocallis fulva, Hibiscus spp., Hordeum spp. (e.g. Hordeum vulgare), Ipomoea batatas, Juglans spp., Lactuca sativa, Lathyrus spp., Lens culinaris, Linum usitatissimum, Litchi chinensis, Lotus spp., Luffa acutangula, Lupinus spp., Luzula sylvatica, Lycopersicon spp. (e.g. Lycopersicon esculentum, Lycopersicon lycopersicum, Lycopersicon pyriforme), Macrotyloma spp., Malus spp., Malpighia emarginata, Mammea americana, Mangifera indica, Manihot spp., Manikara zapota, Medicago sativa, Melilotus spp., Mentha spp., Miscanthus sinensis, Momordica spp., Morus nigra, Musa spp., Nicotiana spp., Olea spp., Opuntia spp., Ornithopus spp., Oryza spp. (e.g. Oryza sativa, Oryza latifolia), Panicum miliaceum, Panicum virgatum, Passiflora edulis, Pastinaca sativa, Pennisetum sp., Persea spp., Petroselinum crispum, Phalaris arundinacea, Phaseolus spp., Phleum pratense, Phoenix spp., Phragmites australis, Physalis spp., Pinus spp., Pistacia vera, Pisum spp., Poa spp., Populus spp., Prosopis spp., Prunus spp., Psidium spp., Punica granatum, Pyrus communis, Quercus spp., Raphanus sativus, Rheum rhabarbarum, Ribes spp., Ricinus communis, Rubus spp., Saccharum spp., Salix sp., Sambucus spp., Secale cereale, Sesamum spp., Sinapis sp., Solanum spp. (e.g. Solanum tuberosum, Solanum integrifolium or Solanum lycopersicum), Sorghum bicolor, Spinacia spp., Syzygium spp., Tagetes spp., Tamarindus indica, Theobroma cacao, Trifolium spp., Tripsacum dactyloides, Triticosecale rimpaui, Triticum spp. (e.g. Triticum aestivum, Triticum durum, Triticum turgidum, Triticum hybernum, Triticum macha, Triticum sativum, Triticum monococcum or Triticum vulgare), Tropaeolum minus, Tropaeolum majus, Vaccinium spp., Vida spp., Vigna spp., Viola odorata, Vitis spp., Zea mays, Zizania palustris, Ziziphus spp., amongst others.

### Control Plant(s)

[0170] The choice of suitable control plants is a routine part of an experimental setup and may include corresponding wild type plants or corresponding plants without the gene of interest. The control plant is typically of the same plant species or even of the same variety as the plant to be assessed. The control plant may also be a nullizygote of the plant to be assessed. Nullizygotes are individuals missing the transgene by segregation. A “control plant” as used herein refers not only to whole plants, but also to plant parts, including seeds and seed parts.

### DETAILED DESCRIPTION OF THE INVENTION

[0171] Surprisingly, it has now been found that modulating expression in a plant of a nucleic acid encoding an OsRSZ33 RRM polypeptide or a growth-related polypeptide or a ZPR polypeptide as described hereunder gives plants having enhanced yield-related traits, in particular increased yield, and more particularly increased seed yield relative to control plants.

[0172] According to a first embodiment, the present invention provides a method for enhancing yield-related traits in plants relative to control plants, comprising modulating expression in a plant of a nucleic acid encoding an OsRSZ33 RRM polypeptide or a growth-related polypeptide as defined herein or a ZPR polypeptide and optionally selecting for plants having enhanced yield-related traits.

[0173] According to another embodiment, the present invention provides a method for producing plants having enhanced yield-related traits relative to control plants, wherein said method comprises the steps of modulating expression in said plant of a nucleic acid encoding an OsRSZ33 RRM polypeptide, or a growth-related polypeptide or a ZPR polypeptide as described herein and optionally selecting for plants having enhanced yield-related traits.

[0174] A preferred method for modulating, preferably increasing, expression of a nucleic acid encoding an OsRSZ33 RRM polypeptide or a growth-related polypeptide as described herein or a ZPR polypeptide is by introducing and expressing in a plant a nucleic acid encoding an OsRSZ33 RRM polypeptide or a growth-related polypeptide as provided herein or a ZPR polypeptide, respectively.

[0175] Concerning “OsRSZ33 RRM polypeptides” any reference hereinafter to a “protein useful in the methods of the invention” is taken to mean an OsRSZ33 RRM polypeptide as defined herein. Any reference hereinafter to a “nucleic acid useful in the methods of the invention” is taken to mean a nucleic acid capable of encoding such an OsRSZ33 RRM polypeptide. The isolated nucleic acid to be introduced into a plant (and therefore useful in performing the methods of the invention) is any nucleic acid encoding the type of protein which will now be described, hereafter also named “OsRSZ33 RRM nucleic acid” or “OsRSZ33 RRM gene”. Preferably the isolated OsRSZ33 RRM nucleic acid to be introduced into a host cell or plant is substantially similar to the endogenous OsRSZ33 RRM gene of that host cell or host plant. In one preferred embodiment, the nucleic acid encoding the OsRSZ33 RRM polypeptide is a genomic sequence, in another preferred embodiment, the nucleic acid encoding the OsRSZ33 RRM polypeptide is a cDNA sequence.

[0176] Concerning “growth-related proteins”, also denoted as GRP, any reference hereinafter to a “protein useful in the methods of the invention” is taken to mean a growth-related polypeptide as defined herein. Any reference hereinafter to a “nucleic acid useful in the methods of the invention” is taken to mean a nucleic acid capable of encoding a growth-related polypeptide as defined herein. The nucleic acid to be introduced into a plant, and therefore useful in performing the methods of the invention, is any nucleic acid encoding the type of protein which will now be described, hereafter also named “growth-related nucleic acid” or “growth-related gene”.

[0177] Concerning ZPR polypeptides, any reference hereinafter to a “protein useful in the methods of the invention” is taken to mean a “ZPR polypeptide”, also named “ZPR protein” as defined herein. ZPR stands for “Little Zipper Protein. Any reference hereinafter to a “nucleic acid useful in the methods of the invention” is taken to mean a nucleic acid capable of encoding such a ZPR polypeptide. The nucleic acid to be introduced into a plant (and therefore useful in performing the methods of the invention) is any nucleic acid encoding the type of protein which will now be described, hereafter also named “ZPR nucleic acid” or “ZPR gene”.

[0178] An “OsRSZ33 RRM polypeptide” as defined herein refers to any polypeptide comprising from N- to C-terminus an RRM domain, two Zinc Knuckles and an RS domain (FIG. 1). Preferably, the RRM domain corresponds to the RRM_{—}1 domain of Pfam entry PF00076 (SMART SM00360, ProfileScan PS50102) and the Zn knuckles to the zf-CCHC domain of Pfam entry PF00098 (SMART SM00343, ProfileScan PS50158, FPrintScan PR00939). Preferably, the C-terminal domain starting from the last conserved Cys residue of the second Znc finger domain (which C-terminal domain comprises the RS domain), has an Arg+Ser content of more than 13%, preferably at least 14, 15, 16, 17, 18, 19, 20%, more preferably at least 21, 22, 23, 24, 25, 26, 27, 28, 29%, most preferably it has 30%, 31%, 32, 33%, 34%, 35% or more of the amino acids are Arg and/or Ser.

[0179] Alternatively and/or additionally, the OsRSZ33 RRM polypeptide comprises one or more of the following motifs:

Motif 1 (SEQ ID NO: 241): PPPG[ST]GRCFNCG[IL]DGHWA
RDCKAGDWKNKCYRCGERGHIERNC[QK]NSP[KR][KN]L
Motif 2 (SEQ ID NO: 242): [AHL]F[SG][RK]YGR[VI]R
[GDE]V[DE][ML]K[NRH]D[YF]AF[VI][DE]FSDPRDA[DE][DE]
ARY[NS]L[DN]GRD[VF]DGSRI[ILV]VEFA
Motif3 (SEQ ID NO: 243): YG[NGS]TRLYVG[RH]L[SA]SRT
R[ST]RDLE

[0180] Motifs 1 to 3 were derived using the MEME algorithm (Bailey and Elkan, Proceedings of the Second International Conference on Intelligent Systems for Molecular Biology, pp. 28-36, AAAI Press, Menlo Park, Calif., 1994). At each position within a MEME motif, the residues are shown that are present in the query set of sequences with a frequency higher than 0.2. Residues within square brackets represent alternatives.

[0181] Alternatively and or additionally, OsRSZ33 RRM polypeptides comprise one or more of the following signature sequences:

Motif 4 (SEQ ID NO: 244): RLYVGRL
Motif 5 (SEQ ID NO: 245): RDYAFIE
Motif 6 (SEQ ID NO: 246): RSYSRS

[0182] Motifs 4 and 5 are related to respectively the RNP 2 and RNP1 submotifs in the RRM domain (Lopato et al., 2002).

[0183] More preferably, the OsRSZ33 RRM polypeptide comprises in increasing order of preference, at least 2, at least 3, at least 4, at least 5, or all 6 motifs.

[0184] Additionally or alternatively, the homologue of an OsRSZ33 RRM protein has in increasing order of preference at least 25%, 26%, 27%, 28%, 29%, 30%, 31%, 32%, 33%, 34%, 35%, 36%, 37%, 38%, 39%, 40%, 41%, 42%, 43%, 44%, 45%, 46%, 47%, 48%, 49%, 50%, 51%, 52%, 53%, 54%, 55%, 56%, 57%, 58%, 59%, 60%, 61%, 62%, 63%, 64%, 65%, 66%, 67%, 68%, 69%, 70%, 71%, 72%, 73%, 74%, 75%, 76%, 77%, 78%, 79%, 80%, 81%, 82%, 83%, 84%, 85%, 86%, 87%, 88%, 89%, 90%, 91%, 92%, 93%, 94%, 95%, 96%, 97%, 98%, or 99% overall sequence identity to the amino acid represented by SEQ ID NO: 2, provided that the homologous protein comprises any one or more of the conserved motifs as outlined above. The overall sequence identity is determined using a global alignment algorithm, such as the Needleman Wunsch algorithm in the program GAP (GCG Wisconsin Package, Accelrys), preferably with default parameters and preferably with sequences of mature proteins (i.e. without taking into account secretion signals or transit peptides). Compared to overall sequence identity, the sequence identity will generally be higher when only conserved domains or motifs are considered. Preferably the motifs in an OsRSZ33 RRM polypeptide have, in increasing order of preference, at least 70%, 71%, 72%, 73%, 74%, 75%, 76%, 77%, 78%, 79%, 80%, 81%, 82%, 83%, 84%, 85%, 86%, 87%, 88%, 89%, 90%, 91%, 92%, 93%, 94%, 95%, 96%, 97%, 98%, or 99% sequence identity to any one or more of the motifs represented by SEQ ID NO: 241 to SEQ ID NO: 246 (Motifs 1 to 6).

[0185] The terms “domain”, “signature” and “motif” are defined in the “definitions” section herein.

[0186] Preferably, the polypeptide sequence which when used in the construction of a phylogenetic tree, such as the one depicted in FIG. 3, clusters with the group of SR proteins with two Zinc Knuckles, polypeptides comprising the amino acid sequence represented by SEQ ID NO: 2 (OsRSZ36), rather than with any other group.

[0187] Furthermore, OsRSZ33 RRM polypeptides (at least in their native form) typically interact with other splicing factors (Lopato et al., 2002). Tools and techniques for measuring protein-protein interactions, such as yeast two-hybrid screens, are well known in the art. Further details are provided in Example 6.

[0188] In addition, OsRSZ33 RRM polypeptides, when expressed in rice according to the methods of the present invention as outlined in Examples 7 and 8, give plants having increased yield related traits, in particular one or more of increased biomass, seed yield and/or early vigour.

[0189] The present invention is illustrated by transforming plants with the nucleic acid sequence represented by SEQ ID NO: 1, encoding the polypeptide sequence of SEQ ID NO: 2. However, performance of the invention is not restricted to these sequences; the methods of the invention may advantageously be performed using any OsRSZ33 RRM-encoding nucleic acid or OsRSZ33 RRM polypeptide as defined herein.

[0190] Examples of nucleic acids encoding OsRSZ33 RRM polypeptides are given in Table A of the Examples section herein. Such nucleic acids are useful in performing the methods of the invention. The amino acid sequences given in Table A of the Examples section are example sequences of orthologues and paralogues of the OsRSZ33 RRM polypeptide represented by SEQ ID NO: 2, the terms “orthologues” and “paralogues” being as defined herein. Further orthologues and paralogues may readily be identified by performing a so-called reciprocal blast search as described in the definitions section; where the query sequence is SEQ ID NO: 1 or SEQ ID NO: 2, the second BLAST (back-BLAST) would be against rice sequences.

[0191] The invention also provides hitherto unknown OsRSZ33 RRM-encoding nucleic acids and OsRSZ33 RRM polypeptides useful for conferring enhanced yield-related traits in plants relative to control plants.

[0192] According to a further embodiment of the present invention, there is therefore provided an isolated nucleic acid molecule selected from:
[0193] (i) a nucleic acid represented by any one of SEQ ID NO: 109, 135, 221, 115, 165, 225, 197, 211, or 237 (B.napus_BN06MC04617_{—}42261920@4606#1; G.max_GM06MC33050_sI61g01@32287#1; H.vulgare_c62741371hv270303@6248#1; V.vinifera_GSVIVT00023097001#1; V.vinifera_GSVIVT00029498001 #1; Z.mays_c67261821gm030403@11244#1; Z.mays_c68511709gm030403@11445#1; Z.mays_ZM07MC13041_BFb0138E15@13012#1; Z.mays_ZM07MC35249_BFb0381I21@35142#1);
[0194] (ii) the complement of any of the nucleic acid represented by any one of SEQ ID NO: 109, 135, 221, 115, 165, 225, 197, 211, or 237;
[0195] (iii) a nucleic acid encoding an OsRSZ33 RRM polypeptide having in increasing order of preference at least 50%, 51%, 52%, 53%, 54%, 55%, 56%, 57%, 58%, 59%, 60%, 61%, 62%, 63%, 64%, 65%, 66%, 67%, 68%, 69%, 70%, 71%, 72%, 73%, 74%, 75%, 76%, 77%, 78%, 79%, 80%, 81%, 82%, 83%, 84%, 85%, 86%, 87%, 88%, 89%, 90%, 91%, 92%, 93%, 94%, 95%, 96%, 97%, 98%, or 99% sequence identity to any of the amino acid sequences represented by SEQ ID NO: 110, 136, 222, 116, 166, 226, 198, 212, or 238 (B.napus_BN06MC04617_{—}42261920@4606#1; >G.max_GM06MC33050_sI61g01@32287#1; >H.vulgare_c62741371hv270303@6248#1; >V.vinifera_GSVIVT00023097001#1; >V.vinifera_GSVIVT00029498001 #1; >Z.mays_c67261821gm030403@11244#1; >Z.mays_c68511709gm030403@11445#1; >Z.mays_ZM07MC13041_BFb0138E15@13012#1; >Z.mays_ZM07MC35249_BFb0381I21@35142#1), and additionally or alternatively comprising one or more motifs having in increasing order of preference at least 50%, 55%, 60%, 65%, 70%, 75%, 80%, 85%, 90%, 95%, 96%, 97%, 98%, 99% or more sequence identity to any one or more of the motifs given in SEQ ID NO: 241 to SEQ ID NO: 246, and further preferably conferring enhanced yield-related traits relative to control plants.
[0196] (iv) a nucleic acid molecule which hybridizes with a nucleic acid molecule of (i) to (iii) under high stringency hybridization conditions and preferably confers enhanced yield-related traits relative to control plants.

[0197] According to a further embodiment of the present invention, there is also provided an isolated polypeptide selected from:
[0198] (i) an amino acid sequence represented by any of SEQ ID NO: 110, 136, 222, 116, 166, 226, 198, 212, or 238 (B.napus_BN06MC04617_{—}42261920@4606#1; >G.max_GM06MC33050_sI61g01@32287#1; >H.vulgare_c62741371hv270303@6248#1; >V.vinifera_GSVIVT00023097001#1; >V.vinifera_GSVIVT00029498001 #1; >Z.mays_c67261821gm030403@11244#1; >Z.mays_c68511709gm030403@11445#1; >Z.mays_ZM07MC13041_BFb0138E15@13012#1; >Z.mays_ZM07MC35249_BFb0381I21@35142#1);
[0199] (ii) an amino acid sequence having, in increasing order of preference, at least 50%, 51%, 52%, 53%, 54%, 55%, 56%, 57%, 58%, 59%, 60%, 61%, 62%, 63%, 64%, 65%, 66%, 67%, 68%, 69%, 70%, 71%, 72%, 73%, 74%, 75%, 76%, 77%, 78%, 79%, 80%, 81%, 82%, 83%, 84%, 85%, 86%, 87%, 88%, 89%, 90%, 91%, 92%, 93%, 94%, 95%, 96%, 97%, 98%, or 99% sequence identity to the amino acid sequence represented by any one of SEQ ID NO: 110, 136, 222, 116, 166, 226, 198, 212, or 238 (B.napus_BN06MC04617_{—}42261920@4606#1; >G.max_GM06MC33050_sI61g01@32287#1; >H.vulgare_c62741371hv270303@6248#1; >V.vinifera_GSVIVT00023097001#1; >V.vinifera_GSVIVT00029498001 #1; >Z.mays_c67261821gm030403@11244#1; >Z.mays_c68511709gm030403@11445#1; >Z.mays_ZM07MC13041_BFb0138E15@13012#1; >Z.mays_ZM07MC35249_BFb0381I21@35142#1), and additionally or alternatively comprising one or more motifs having in increasing order of preference at least 50%, 55%, 60%, 65%, 70%, 75%, 80%, 85%, 90%, 95%, 96%, 97%, 98%, 99% or more sequence identity to any one or more of the motifs given in SEQ ID NO: 241 to SEQ ID NO: 246, and further preferably conferring enhanced yield-related traits relative to control plants;
[0200] (iii) derivatives of any of the amino acid sequences given in (i) or (ii) above.

[0201] Nucleic acid variants may also be useful in practising the methods of the invention. Examples of such variants include nucleic acids encoding homologues and derivatives of any one of the amino acid sequences given in Table A of the Examples section, the terms “homologue” and “derivative” being as defined herein. Also useful in the methods of the invention are nucleic acids encoding homologues and derivatives of orthologues or paralogues of any one of the amino acid sequences given in Table A of the Examples section. Homologues and derivatives useful in the methods of the present invention have substantially the same biological and functional activity as the unmodified protein from which they are derived. Further variants useful in practising the methods of the invention are variants in which codon usage is optimised or in which miRNA target sites are removed.

[0202] Further nucleic acid variants useful in practising the methods of the invention include portions of nucleic acids encoding OsRSZ33 RRM polypeptides, nucleic acids hybridising to nucleic acids encoding OsRSZ33 RRM polypeptides, splice variants of nucleic acids encoding OsRSZ33 RRM polypeptides, allelic variants of nucleic acids encoding OsRSZ33 RRM polypeptides and variants of nucleic acids encoding OsRSZ33 RRM polypeptides obtained by gene shuffling. The terms hybridising sequence, splice variant, allelic variant and gene shuffling are as described herein.

[0203] Nucleic acids encoding OsRSZ33 RRM polypeptides need not be full-length nucleic acids, since performance of the methods of the invention does not rely on the use of full-length nucleic acid sequences. According to the present invention, there is provided a method for enhancing yield-related traits in plants, comprising introducing and expressing in a plant a portion of any one of the nucleic acid sequences given in Table A of the Examples section, or a portion of a nucleic acid encoding an orthologue, paralogue or homologue of any of the amino acid sequences given in Table A of the Examples section.

[0204] A portion of a nucleic acid may be prepared, for example, by making one or more deletions to the nucleic acid. The portions may be used in isolated form or they may be fused to other coding (or non-coding) sequences in order to, for example, produce a protein that combines several activities. When fused to other coding sequences, the resultant polypeptide produced upon translation may be bigger than that predicted for the protein portion.

[0205] Portions useful in the methods of the invention, encode an OsRSZ33 RRM polypeptide as defined herein, and have substantially the same biological activity as the amino acid sequences given in Table A of the Examples section. Preferably, the portion is a portion of any one of the nucleic acids given in Table A of the Examples section, or is a portion of a nucleic acid encoding an orthologue or paralogue of any one of the amino acid sequences given in Table A of the Examples section. Preferably the portion is at least 400, 450, 500, 550, 600, 650, 700, 750, 800, 850, 900, 950, 1000, 1050, 1100 consecutive nucleotides in length, the consecutive nucleotides being of any one of the nucleic acid sequences given in Table A of the Examples section, or of a nucleic acid encoding an orthologue or paralogue of any one of the amino acid sequences given in Table A of the Examples section. Most preferably the portion is a portion of the nucleic acid of SEQ ID NO: 1. Preferably, the portion encodes a fragment of an amino acid sequence which, when used in the construction of a phylogenetic tree, such as the one depicted in FIG. 3, clusters with the group of SR proteins with two Zinc Knuckles, polypeptides comprising the amino acid sequence represented by SEQ ID NO: 2 (OsRSZ36), rather than with any other group and/or comprises an RRM domain, two Zinc knuckle domains and preferably also one or more of motifs 1 to 6.

[0206] Another nucleic acid variant useful in the methods of the invention is a nucleic acid capable of hybridising, under reduced stringency conditions, preferably under stringent conditions, with a nucleic acid encoding an OsRSZ33 RRM polypeptide as defined herein, or with a portion as defined herein.

[0207] According to the present invention, there is provided a method for enhancing yield-related traits in plants, comprising introducing and expressing in a plant a nucleic acid capable of hybridizing to any one of the nucleic acids given in Table A of the Examples section, or comprising introducing and expressing in a plant a nucleic acid capable of hybridising to a nucleic acid encoding an orthologue, paralogue or homologue of any of the nucleic acid sequences given in Table A of the Examples section.

[0208] Hybridising sequences useful in the methods of the invention encode an OsRSZ33 RRM polypeptide as defined herein, having substantially the same biological activity as the amino acid sequences given in Table A of the Examples section. Preferably, the hybridising sequence is capable of hybridising to the complement of any one of the nucleic acids given in Table A of the Examples section, or to a portion of any of these sequences, a portion being as defined above, or the hybridising sequence is capable of hybridising to the complement of a nucleic acid encoding an orthologue or paralogue of any one of the amino acid sequences given in Table A of the Examples section. Most preferably, the hybridising sequence is capable of hybridising to the complement of a nucleic acid as represented by SEQ ID NO: 1 or to a portion thereof.

[0209] Preferably, the hybridising sequence encodes a polypeptide with an amino acid sequence which, when full-length and used in the construction of a phylogenetic tree, such as the one depicted in FIG. 3, clusters with the group of SR proteins with two Zinc Knuckles, polypeptides comprising the amino acid sequence represented by SEQ ID NO: 2 (OsRSZ36), rather than with any other group and/or comprises an RRM domain, two Zinc knuckle domains and preferably also one or more of motifs 1 to 6.

[0210] Another nucleic acid variant useful in the methods of the invention is a splice variant encoding an OsRSZ33 RRM polypeptide as defined hereinabove, a splice variant being as defined herein.

[0211] According to the present invention, there is provided a method for enhancing yield-related traits in plants, comprising introducing and expressing in a plant a splice variant of any one of the nucleic acid sequences given in Table A of the Examples section, or a splice variant of a nucleic acid encoding an orthologue, paralogue or homologue of any of the amino acid sequences given in Table A of the Examples section.

[0212] Preferred splice variants are splice variants of a nucleic acid represented by SEQ ID NO: 1, or a splice variant of a nucleic acid encoding an orthologue or paralogue of SEQ ID NO: 2. Preferably, the amino acid sequence encoded by the splice variant, when used in the construction of a phylogenetic tree, such as the one depicted in FIG. 3, clusters with the group of SR proteins with two Zinc Knuckles, polypeptides comprising the amino acid sequence represented by SEQ ID NO: 2 (OsRSZ36), rather than with any other group and/or comprises an RRM domain, two Zinc knuckle domains and preferably also one or more of motifs 1 to 6.

[0213] Another nucleic acid variant useful in performing the methods of the invention is an allelic variant of a nucleic acid encoding an OsRSZ33 RRM polypeptide as defined hereinabove, an allelic variant being as defined herein.

[0214] According to the present invention, there is provided a method for enhancing yield-related traits in plants, comprising introducing and expressing in a plant an allelic variant of any one of the nucleic acids given in Table A of the Examples section, or comprising introducing and expressing in a plant an allelic variant of a nucleic acid encoding an orthologue, paralogue or homologue of any of the amino acid sequences given in Table A of the Examples section.

[0215] The polypeptides encoded by allelic variants useful in the methods of the present invention have substantially the same biological activity as the OsRSZ33 RRM polypeptide of SEQ ID NO: 2 and any of the amino acids depicted in Table A of the Examples section. Allelic variants exist in nature, and encompassed within the methods of the present invention is the use of these natural alleles. Preferably, the allelic variant is an allelic variant of SEQ ID NO: 1 or an allelic variant of a nucleic acid encoding an orthologue or paralogue of SEQ ID NO: 2. Preferably, the amino acid sequence encoded by the allelic variant, when used in the construction of a phylogenetic tree, such as the one depicted in FIG. 3, clusters with the group of SR proteins with two Zinc Knuckles, polypeptides comprising the amino acid sequence represented by SEQ ID NO: 2 (OsRSZ36), rather than with any other group and/or comprises an RRM domain, two Zinc knuckle domains and preferably also one or more of motifs 1 to 6.

[0216] Gene shuffling or directed evolution may also be used to generate variants of nucleic acids encoding OsRSZ33 RRM polypeptides as defined above; the term “gene shuffling” being as defined herein.

[0217] According to the present invention, there is provided a method for enhancing yield-related traits in plants, comprising introducing and expressing in a plant a variant of any one of the nucleic acid sequences given in Table A of the Examples section, or comprising introducing and expressing in a plant a variant of a nucleic acid encoding an orthologue, paralogue or homologue of any of the amino acid sequences given in Table A of the Examples section, which variant nucleic acid is obtained by gene shuffling.

[0218] Preferably, the amino acid sequence encoded by the variant nucleic acid obtained by gene shuffling, when used in the construction of a phylogenetic tree such as the one depicted in FIG. 3, clusters with the group of SR proteins with two Zinc Knuckles, polypeptides comprising the amino acid sequence represented by SEQ ID NO: 2 (OsRSZ36), rather than with any other group and/or comprises an RRM domain, two Zinc knuckle domains and preferably also one or more of motifs 1 to 6.

[0219] Furthermore, nucleic acid variants may also be obtained by site-directed mutagenesis. Several methods are available to achieve site-directed mutagenesis, the most common being PCR based methods (Current Protocols in Molecular Biology. Wiley Eds.).

[0220] Nucleic acids encoding OsRSZ33 RRM polypeptides may be derived from any natural or artificial source. The nucleic acid may be modified from its native form in composition and/or genomic environment through deliberate human manipulation. Preferably the OsRSZ33 RRM polypeptide-encoding nucleic acid is from a plant, further preferably from a monocotyledonous plant, more preferably from the family Poaceae, most preferably the nucleic acid is from Oryza sativa.

[0221] Performance of the methods of the invention gives plants having enhanced yield-related traits. In particular performance of the methods of the invention gives plants having increased early vigour and/or increased yield, especially increased seed yield and/or increased biomass relative to control plants. The terms “early vigour”, “yield” and “seed yield” are described in more detail in the “definitions” section herein.

[0222] Reference herein to enhanced yield-related traits is taken to mean an increase early vigour and/or in biomass (weight) of one or more parts of a plant, which may include aboveground (harvestable) parts and/or (harvestable) parts below ground. In particular, such harvestable parts are vegetative biomass (roots and/or shoots) and seeds, and performance of the methods of the invention results in plants having increased yield (increased biomass and/or seed yield) and/or increased early vigour, relative to the yield of control plants.

[0223] The present invention provides a method for increasing yield-related traits, especially early vigour, biomass and/ore seed yield of plants, relative to control plants, which method comprises modulating expression in a plant of a nucleic acid encoding an OsRSZ33 RRM polypeptide as defined herein.

[0224] Since the transgenic plants according to the present invention have increased yield-related traits, it is likely that these plants exhibit an increased growth rate (during at least part of their life cycle), relative to the growth rate of control plants at a corresponding stage in their life cycle.

[0225] According to a preferred feature of the present invention, performance of the methods of the invention gives plants having an increased growth rate relative to control plants. Therefore, according to the present invention, there is provided a method for increasing the growth rate of plants, which method comprises modulating expression in a plant of a nucleic acid encoding an OsRSZ33 RRM polypeptide as defined herein.

[0226] Performance of the methods of the invention gives plants grown under non-stress conditions or under mild drought conditions increased yield relative to control plants grown under comparable conditions. Therefore, according to the present invention, there is provided a method for increasing yield in plants grown under non-stress conditions or under mild drought conditions, which method comprises modulating expression in a plant of a nucleic acid encoding an OsRSZ33 RRM polypeptide.

[0227] Performance of the methods of the invention gives plants grown under conditions of nutrient deficiency, particularly under conditions of nitrogen deficiency, increased yield relative to control plants grown under comparable conditions. Therefore, according to the present invention, there is provided a method for increasing yield in plants grown under conditions of nutrient deficiency, which method comprises modulating expression in a plant of a nucleic acid encoding an OsRSZ33 RRM polypeptide.

[0228] Performance of the methods of the invention gives plants grown under conditions of salt stress, increased yield relative to control plants grown under comparable conditions. Therefore, according to the present invention, there is provided a method for increasing yield in plants grown under conditions of salt stress, which method comprises modulating expression in a plant of a nucleic acid encoding an OsRSZ33 RRM polypeptide.

[0229] The invention also provides genetic constructs and vectors to facilitate introduction and/or expression in plants of nucleic acids encoding OsRSZ33 RRM polypeptides. The gene constructs may be inserted into vectors, which may be commercially available, suitable for transforming into plants and suitable for expression of the gene of interest in the transformed cells. The invention also provides use of a gene construct as defined herein in the methods of the invention.

[0230] More specifically, the present invention provides a construct comprising:
[0231] (a) a nucleic acid encoding an OsRSZ33 RRM polypeptide as defined above;
[0232] (b) one or more control sequences capable of driving expression of the nucleic acid sequence of (a); and optionally
[0233] (c) a transcription termination sequence.

[0234] Preferably, the nucleic acid encoding an OsRSZ33 RRM polypeptide is as defined above. The term “control sequence” and “termination sequence” are as defined herein.

[0235] The invention furthermore provides plants transformed with a construct as described above. In particular, the invention provides plants transformed with a construct as described above, which plants have increased yield-related traits as described herein.

[0236] Plants are transformed with a vector comprising any of the nucleic acids described above. The skilled artisan is well aware of the genetic elements that must be present on the vector in order to successfully transform, select and propagate host cells containing the sequence of interest. The sequence of interest is operably linked to one or more control sequences (at least to a promoter).

[0237] Advantageously, any type of promoter, whether natural or synthetic, may be used to drive expression of the nucleic acid sequence, but preferably the promoter is of plant origin. A constitutive promoter is particularly useful in the methods. Preferably the constitutive promoter is a ubiquitous constitutive promoter of medium strength. See the “Definitions” section herein for definitions of the various promoter types.

[0238] It should be clear that the applicability of the present invention is not restricted to the OsRSZ33 RRM polypeptide-encoding nucleic acid represented by SEQ ID NO: 1, nor is the applicability of the invention restricted to expression of an OsRSZ33 RRM polypeptide-encoding nucleic acid when driven by a constitutive promoter.

[0239] The constitutive promoter is preferably a medium strength promoter. More preferably it is a plant derived promoter, such as a GOS2 promoter or a promoter of substantially the same strength and having substantially the same expression pattern (a functionally equivalent promoter), more preferably the promoter is the promoter GOS2 promoter from rice. Further preferably the constitutive promoter is represented by a nucleic acid sequence substantially similar to SEQ ID NO: 247, most preferably the constitutive promoter is as represented by SEQ ID NO: 247. See the “Definitions” section herein for further examples of constitutive promoters.

[0240] Optionally, one or more terminator sequences may be used in the construct introduced into a plant. Preferably, the construct comprises an expression cassette comprising a GOS2 promoter, substantially similar to SEQ ID NO: 247, and the nucleic acid encoding the OsRSZ33 RRM polypeptide. Furthermore, one or more sequences encoding selectable markers may be present on the construct introduced into a plant.

[0241] According to a preferred feature of the invention, the modulated expression is increased expression. Methods for increasing expression of nucleic acids or genes, or gene products, are well documented in the art and examples are provided in the definitions section.

[0242] As mentioned above, a preferred method for modulating expression of a nucleic acid encoding an OsRSZ33 RRM polypeptide is by introducing and expressing in a plant a nucleic acid encoding an OsRSZ33 RRM polypeptide; however the effects of performing the method, i.e. enhancing yield-related traits may also be achieved using other well known techniques, including but not limited to T-DNA activation tagging, TILLING, homologous recombination. A description of these techniques is provided in the definitions section.

[0243] The invention also provides a method for the production of transgenic plants having enhanced yield-related traits relative to control plants, comprising introduction and expression in a plant of any nucleic acid encoding an OsRSZ33 RRM polypeptide as defined hereinabove.

[0244] More specifically, the present invention provides a method for the production of transgenic plants having enhanced yield-related traits, particularly increased yield and/or increased early vigour, which method comprises:
[0245] (i) introducing and expressing in a plant or plant cell an OsRSZ33 RRM polypeptide-encoding nucleic acid or a genetic construct comprising an OsRSZ33 RRM polypeptide-encoding nucleic acid; and
[0246] (ii) cultivating the plant cell under conditions promoting plant growth and development.

[0247] The nucleic acid of (i) may be any of the nucleic acids capable of encoding an OsRSZ33 RRM polypeptide as defined herein.

[0248] The nucleic acid may be introduced directly into a plant cell or into the plant itself (including introduction into a tissue, organ or any other part of a plant). According to a preferred feature of the present invention, the nucleic acid is preferably introduced into a plant by transformation. The term “transformation” is described in more detail in the “definitions” section herein.

[0249] The present invention clearly extends to any plant cell or plant produced by any of the methods described herein, and to all plant parts and propagules thereof. The present invention encompasses plants or parts thereof (including seeds) obtainable by the methods according to the present invention. The plants or parts thereof comprise a nucleic acid transgene encoding an OsRSZ33 RRM polypeptide as defined above. The present invention extends further to encompass the progeny of a primary transformed or transfected cell, tissue, organ or whole plant that has been produced by any of the aforementioned methods, the only requirement being that progeny exhibit the same genotypic and/or phenotypic characteristic(s) as those produced by the parent in the methods according to the invention.

[0250] The invention also includes host cells containing an isolated nucleic acid encoding an OsRSZ33 RRM polypeptide as defined hereinabove. Preferred host cells according to the invention are plant cells. Host plants for the nucleic acids or the vector used in the method according to the invention, the expression cassette or construct or vector are, in principle, advantageously all plants, which are capable of synthesizing the polypeptides used in the inventive method.

[0251] The methods of the invention are advantageously applicable to any plant. Plants that are particularly useful in the methods of the invention include all plants which belong to the superfamily Viridiplantae, in particular monocotyledonous and dicotyledonous plants including fodder or forage legumes, ornamental plants, food crops, trees or shrubs. According to a preferred embodiment of the present invention, the plant is a crop plant. Examples of crop plants include soybean, chicory, carrot, cassava, trefoil, beet, sugar beet, sunflower, canola, alfalfa, rapeseed, linseed, cotton, tomato, potato and tobacco. Further preferably, the plant is a monocotyledonous plant. Examples of monocotyledonous plants include sugarcane. More preferably the plant is a cereal. Examples of cereals include rice, maize, wheat, barley, millet, rye, triticale, sorghum, emmer, spelt, secale, einkorn, teff, milo and oats.

[0252] The invention also extends to harvestable parts of a plant such as, but not limited to seeds, leaves, fruits, flowers, stems, roots, rhizomes, tubers and bulbs, which harvestable parts comprise a recombinant nucleic acid encoding an OsRSZ33 RRM polypeptide. The invention furthermore relates to products derived, preferably directly derived, from a harvestable part of such a plant, such as dry pellets or powders, oil, fat and fatty acids, starch or proteins.

[0253] The present invention also encompasses use of nucleic acids encoding OsRSZ33 RRM polypeptides as described herein and use of these OsRSZ33 RRM polypeptides in enhancing any of the aforementioned yield-related traits in plants. For example, nucleic acids encoding OsRSZ33 RRM polypeptide described herein, or the OsRSZ33 RRM polypeptides themselves, may find use in breeding programmes in which a DNA marker is identified which may be genetically linked to an OsRSZ33 RRM polypeptide-encoding gene. The nucleic acids/genes, or the OsRSZ33 RRM polypeptides themselves may be used to define a molecular marker. This DNA or protein marker may then be used in breeding programmes to select plants having enhanced yield-related traits as defined hereinabove in the methods of the invention. Furthermore, allelic variants of an OsRSZ33 RRM polypeptide-encoding nucleic acid/gene may find use in marker-assisted breeding programmes. Nucleic acids encoding OsRSZ33 RRM polypeptides may also be used as probes for genetically and physically mapping the genes that they are a part of, and as markers for traits linked to those genes. Such information may be useful in plant breeding in order to develop lines with desired phenotypes.

[0254] The terms “growth-related polypeptide”, “growth-related protein” or “GRP”, as given herein are all intended to include a polypeptide as represented by SEQ ID NO: 251 and homologues thereof. In an embodiment, a homologue of a GRP has in increasing order of preference at least 25%, 26%, 27%, 28%, 29%, 30%, 31%, 32%, 33%, 34%, 35%, 36%, 37%, 38%, 39%, 40%, 41%, 42%, 43%, 44%, 45%, 46%, 47%, 48%, 49%, 50%, 51%, 52%, 53%, 54%, 55%, 56%, 57%, 58%, 59%, 60%, 61%, 62%, 63%, 64%, 65%, 66%, 67%, 68%, 69%, 70%, 71%, 72%, 73%, 74%, 75%, 76%, 77%, 78%, 79%, 80%, 81%, 82%, 83%, 84%, 85%, 86%, 87%, 88%, 89%, 90%, 91%, 92%, 93%, 94%, 95%, 96%, 97%, 98%, or 99% overall sequence identity to the amino acid represented by SEQ ID NO: 251.

[0255] In an embodiment of the invention a method as provided herein is presented wherein said method comprises the modulation of expression in a plant of a nucleic acid encoding a growth-related protein (GRP) having at least 25% sequence identity to the amino acid sequence represented by SEQ ID NO: 251. In another embodiment, the present method comprises the modulation of expression in a plant of a nucleic acid encoding a growth-related protein (GRP) having at least 25%, and for instance at least 26%, 27%, 28%, 29%, 30%, 31%, 32%, 33%, 34%, 35%, 36%, 37%, 38%, 39%, 40%, 41%, 42%, 43%, 44%, 45%, 46%, 47%, 48%, 49%, 50%, 51%, 52%, 53%, 54%, 55%, 56%, 57%, 58%, 59%, 60%, 61%, 62%, 63%, 64%, 65%, 66%, 67%, 68%, 69%, 70%, 71%, 72%, 73%, 74%, 75%, 76%, 77%, 78%, 79%, 80%, 81%, 82%, 83%, 84%, 85%, 86%, 87%, 88%, 89%, 90%, 91%, 92%, 93%, 94%, 95%, 96%, 97%, 98%, or 99% overall sequence identity to the amino acid represented by SEQ ID NO: 251.

[0256] In another embodiment, a growth-related polypeptide according to the present invention comprises a conserved motif. The terms “domain”, “signature” and “motif” are defined in the “definitions” section herein.

[0257] In particular, in a preferred embodiment, a growth-related polypeptide according to the present invention comprises a motif which has at least 70% sequence identity to motif 7: [NHPS][SC][CR][RK]K[NK][VST][PD][GD][TAV][ST]F[VL][SE]DL[RK]DH[IM][HD]EFI[NH]AS[ASM]DEH[MRK][TH]CF[TK][KN]T[IL][KQ][KR]MF[GD]MS[KM][TAV]V[AT] (SEQ ID NO: 742). Motif 7 was derived using the MEME algorithm (Bailey and Elkan, Proceedings of the Second International Conference on Intelligent Systems for Molecular Biology, pp. 28-36, AAAI Press, Menlo Park, Calif., 1994). At each position within a MEME motif, the residues are shown that are present in the query set of sequences with a frequency higher than 0.2. Residues within square brackets represent alternatives. In a preferred embodiment, a growth-related polypeptide according to the present invention comprises a motif which has in increasing order of preference at least 71%, 72%, 73%, 74%, 75%, 76%, 77%, 78%, 79%, 80%, 81%, 82%, 83%, 84%, 85%, 86%, 87%, 88%, 89%, 90%, 91%, 92%, 93%, 94%, 95%, 96%, 97%, 98%, or 99% sequence identity to the motif represented by SEQ ID NO: 742 (Motif 7).

[0258] Additionally or alternatively, the homologue of a GRP has in increasing order of preference at least 25%, 26%, 27%, 28%, 29%, 30%, 31%, 32%, 33%, 34%, 35%, 36%, 37%, 38%, 39%, 40%, 41%, 42%, 43%, 44%, 45%, 46%, 47%, 48%, 49%, 50%, 51%, 52%, 53%, 54%, 55%, 56%, 57%, 58%, 59%, 60%, 61%, 62%, 63%, 64%, 65%, 66%, 67%, 68%, 69%, 70%, 71%, 72%, 73%, 74%, 75%, 76%, 77%, 78%, 79%, 80%, 81%, 82%, 83%, 84%, 85%, 86%, 87%, 88%, 89%, 90%, 91%, 92%, 93%, 94%, 95%, 96%, 97%, 98%, or 99% overall sequence identity to the amino acid represented by SEQ ID NO: 251, provided that the homologous protein comprises a motif which has at least 70% sequence identity to conserved motif 7 as outlined above. The overall sequence identity is determined using a global alignment algorithm, such as the Needleman Wunsch algorithm in the program GAP (GCG Wisconsin Package, Accelrys), preferably with default parameters and preferably with sequences of mature proteins (i.e. without taking into account secretion signals or transit peptides). Compared to overall sequence identity, the sequence identity will generally be higher when only conserved domains or motifs are considered. Preferably the motif in a GRP has at least 70%, and for instance at least 71%, 72%, 73%, 74%, 75%, 76%, 77%, 78%, 79%, 80%, 81%, 82%, 83%, 84%, 85%, 86%, 87%, 88%, 89%, 90%, 91%, 92%, 93%, 94%, 95%, 96%, 97%, 98%, or 99% sequence identity to the motif represented by SEQ ID NO: 742 (Motif 7).

[0259] In an example, a growth-related polypeptide according to the present invention has a motif which has at least 70%, and for instance at least 71%, 72%, 73%, 74%, 75%, 76%, 77%, 78%, 79%, 80%, 81%, 82%, 83%, 84%, 85%, 86%, 87%, 88%, 89%, 90%, 91%, 92%, 93%, 94%, 95%, 96%, 97%, 98%, 99% sequence identity to motif X, or corresponds to motif X, wherein motif X is represented by: SCRKKKSDDATFLEDLKDHIDEFIHASMDEHKHCFK NTIQKMFGMSKVVA (SEQ ID NO: 743).

[0260] In other words, in another embodiment a method is provided wherein said GRP comprises a motif which has at least 70%, 71%, 72%, 73%, 74%, 75%, 76%, 77%, 78%, 79%, 80%, 81%, 82%, 83%, 84%, 85%, 86%, 87%, 88%, 89%, 90%, 91%, 92%, 93%, 94%, 95%, 96%, 97%, 98%, or 99% sequence identity to, or corresponds to a conserved domain of amino acid coordinates 23 to 72 of SEQ ID NO:251.

[0261] In addition, growth-related polypeptides according to the invention, when expressed transgenic plants such as e.g. rice according to the methods of the present invention as outlined in the example section, give plants having increased yield-related traits, and preferably increased yield relative to control plants, and even more preferably wherein said increased yield-related traits is selected from the group comprising or consisting of increased seed yield, increased biomass and early vigour.

[0262] The present invention is illustrated by transforming plants with the nucleic acid sequence represented by SEQ ID NO: 250, encoding the polypeptide sequence of SEQ ID NO: 251. However, performance of the invention is not restricted to these sequences; the methods of the invention may advantageously be performed using any GRP-encoding nucleic acid or GRP polypeptide as defined herein.

[0263] Examples of nucleic acids encoding GRP polypeptides are given in Table F of the Examples section. Any of the sequences listed in Table F is suitable for performing the methods according to the invention. The amino acid sequences given in Table F of the Examples section are exemplary sequences of orthologues and paralogues of the polypeptide represented by SEQ ID NO: 251, the terms “orthologues” and “paralogues” being as defined herein. Further orthologues and paralogues may readily be identified by performing a so-called reciprocal blast search as described in the definitions section; where the query sequence is SEQ ID NO: 250 or SEQ ID NO: 251, the second BLAST (back-BLAST) would be against rice sequences.

[0264] The invention also provides hitherto unknown GRP-encoding nucleic acids and growth-related proteins useful for conferring enhanced yield-related traits in plants relative to control plants.

[0265] According to an embodiment of the present invention, there is therefore provided an isolated nucleic acid selected from:
[0266] (i) a nucleic acid represented by any one of SEQ ID NO: 266, 286, 316, 374, 376, 380, 424, 456, 458, 460, 462, 648, 650, 670, and 736;
[0267] (ii) the complement of a nucleic acid represented by any one of SEQ ID NO: 266, 286, 316, 374, 376, 380, 424, 456, 458, 460, 462, 648, 650, 670, and 736;
[0268] (iii) a nucleic acid encoding the polypeptide as represented by any one of SEQ ID NO: 267, 287, 317, 375, 377, 381, 425, 457, 459, 461, 463, 649, 651, 671 and 737, preferably as a result of the degeneracy of the genetic code, said isolated nucleic acid can be derived from a polypeptide sequence as represented by any one of SEQ ID NO: 267, 287, 317, 375, 377, 381, 425, 457, 459, 461, 463, 649, 651, 671 and 737 and further preferably confers enhanced yield-related traits relative to control plants;
[0269] (iv) a nucleic acid having, in increasing order of preference at least 25%, 26%, 27%, 28%, 29%, 30%, 31%, 32%, 33%, 34%, 35%, 36%, 37%, 38%, 39%, 40%, 41%, 42%, 43%, 44%, 45%, 46%, 47%, 48%, 49%, 50%, 51%, 52%, 53%, 54%, 55%, 56%, 57%, 58%, 59%, 60%, 61%, 62%, 63%, 64%, 65%, 66%, 67%, 68%, 69%, 70%, 71%, 72%, 73%, 74%, 75%, 76%, 77%, 78%, 79%, 80%, 81%, 82%, 83%, 84%, 85%, 86%, 87%, 88%, 89%, 90%, 91%, 92%, 93%, 94%, 95%, 96%, 97%, 98%, or 99% sequence identity with any of the nucleic acid sequences represented by any one of SEQ ID NO: 266, 286, 316, 374, 376, 380, 424, 456, 458, 460, 462, 648, 650, 670, and 736; and any of the other nucleic acid sequences in Table F and further preferably conferring enhanced yield-related traits relative to control plants;
[0270] (v) a nucleic acid molecule which hybridizes with a nucleic acid molecule of (i) to (iv) under stringent hybridization conditions and preferably confers enhanced yield-related traits relative to control plants;
[0271] (vi) a nucleic acid encoding a polypeptide having, in increasing order of preference, at least 25%, 26%, 27%, 28%, 29%, 30%, 31%, 32%, 33%, 34%, 35%, 36%, 37%, 38%, 39%, 40%, 41%, 42%, 43%, 44%, 45%, 46%, 47%, 48%, 49%, 50%, 51%, 52%, 53%, 54%, 55%, 56%, 57%, 58%, 59%, 60%, 61%, 62%, 63%, 64%, 65%, 66%, 67%, 68%, 69%, 70%, 71%, 72%, 73%, 74%, 75%, 76%, 77%, 78%, 79%, 80%, 81%, 82%, 83%, 84%, 85%, 86%, 87%, 88%, 89%, 90%, 91%, 92%, 93%, 94%, 95%, 96%, 97%, 98%, or 99% sequence identity to the amino acid sequence represented by any one of SEQ ID NO: 267, 287, 317, 375, 377, 381, 425, 457, 459, 461, 463, 649, 651, 671 and 737 and any of the other amino acid sequences in Table F and preferably conferring enhanced yield-related traits relative to control plants.

[0272] According to another embodiment of the present invention, there is also provided an isolated polypeptide selected from:
[0273] (i) an amino acid sequence represented by any one of SEQ ID NO: 267, 287, 317, 375, 377, 381, 425, 457, 459, 461, 463, 649, 651, 671 and 737;
[0274] (ii) an amino acid sequence having, in increasing order of preference, at least 25%, 26%, 27%, 28%, 29%, 30%, 31%, 32%, 33%, 34%, 35%, 36%, 37%, 38%, 39%, 40%, 41%, 42%, 43%, 44%, 45%, 46%, 47%, 48%, 49%, 50%, 51%, 52%, 53%, 54%, 55%, 56%, 57%, 58%, 59%, 60%, 61%, 62%, 63%, 64%, 65%, 66%, 67%, 68%, 69%, 70%, 71%, 72%, 73%, 74%, 75%, 76%, 77%, 78%, 79%, 80%, 81%, 82%, 83%, 84%, 85%, 86%, 87%, 88%, 89%, 90%, 91%, 92%, 93%, 94%, 95%, 96%, 97%, 98%, or 99% sequence identity to the amino acid sequence represented by any one of SEQ ID NO: 267, 287, 317, 375, 377, 381, 425, 457, 459, 461, 463, 649, 651, 671 and 737, and any of the other amino acid sequences in Table F and preferably conferring enhanced yield-related traits relative to control plants, and
[0275] (iii) derivatives of any of the amino acid sequences given in (i) or (ii) above.

[0276] The invention hence also relates to the use of an isolated nucleic acid as provided above, or of an isolated polypeptide as provided above for enhancing yield-related traits in plants, and preferably wherein said yield-related traits are as defined herein, relative to control plants. Preferably said yield-related traits are as defined in herein relative to control plants. Further preferably said use involves a step of introducing in a plant, plant part or plant cell of such isolated nucleic acid or such isolated polypeptide as defined herein.

[0277] Nucleic acid variants may also be useful in practising the methods of the invention. Examples of such variants include nucleic acids encoding homologues and derivatives of any one of the amino acid sequences given in Table F of the Examples section, the terms “homologue” and “derivative” being as defined herein. Also useful in the methods of the invention are nucleic acids encoding homologues and derivatives of orthologues or paralogues of any one of the amino acid sequences given in Table F of the Examples section. Homologues and derivatives useful in the methods of the present invention have substantially the same biological and functional activity as the unmodified protein from which they are derived. Further variants useful in practising the methods of the invention are variants in which codon usage is optimised or in which miRNA target sites are removed.

[0278] Further nucleic acid variants useful in practising the methods of the invention include portions of nucleic acids encoding growth-related polypeptides, nucleic acids hybridising to nucleic acids encoding growth-related polypeptides, splice variants of nucleic acids encoding growth-related polypeptides, allelic variants of nucleic acids encoding growth-related polypeptides and variants of nucleic acids encoding growth-related polypeptides obtained by gene shuffling. The terms hybridising sequence, splice variant, allelic variant and gene shuffling are as described herein.

[0279] Nucleic acids encoding growth-related polypeptides need not be full-length nucleic acids, since performance of the methods of the invention does not rely on the use of full-length nucleic acid sequences. According to the present invention, there is provided a method for enhancing yield-related traits in plants, comprising introducing and expressing in a plant a portion of any one of the nucleic acid sequences given in Table F of the Examples section, or a portion of a nucleic acid encoding an orthologue, paralogue or homologue of any of the amino acid sequences given in Table F of the Examples section.

[0280] A portion of a nucleic acid may be prepared, for example, by making one or more deletions to the nucleic acid. The portions may be used in isolated form or they may be fused to other coding (or non-coding) sequences in order to, for example, produce a protein that combines several activities. When fused to other coding sequences, the resultant polypeptide produced upon translation may be bigger than that predicted for the protein portion.

[0281] Portions useful in the methods of the invention, encode a growth-related polypeptide as defined herein. Preferably, the portion is a portion of any one of the nucleic acids given in Table F of the Examples section, or is a portion of a nucleic acid encoding an orthologue or paralogue of any one of the amino acid sequences given in Table F of the Examples section. Preferably the portion is at least 150, 200, 250, 300, 350, 400, 450, 500, 550, 600, 650, 700, consecutive nucleotides in length, the consecutive nucleotides being of any one of the nucleic acid sequences given in Table F of the Examples section, or of a nucleic acid encoding an orthologue or paralogue of any one of the amino acid sequences given in Table F of the Examples section. Most preferably the portion is a portion of the nucleic acid of SEQ ID NO: 250. Preferably, the portion encodes a fragment of an amino acid sequence which has a motif having at least 70%, 71%, 72%, 73%, 74%, 75%, 76%, 77%, 78%, 79%, 80%, 81%, 82%, 83%, 84%, 85%, 86%, 87%, 88%, 89%, 90%, 91%, 92%, 93%, 94%, 95%, 96%, 97%, 98%, or 99% sequence identity to motif 7 and/or which has at least 25%, 26%, 27%, 28%, 29%, 30%, 31%, 32%, 33%, 34%, 35%, 36%, 37%, 38%, 39%, 40%, 41%, 42%, 43%, 44%, 45%, 46%, 47%, 48%, 49%, 50%, 51%, 52%, 53%, 54%, 55%, 56%, 57%, 58%, 59%, 60%, 61%, 62%, 63%, 64%, 65%, 66%, 67%, 68%, 69%, 70%, 71%, 72%, 73%, 74%, 75%, 76%, 77%, 78%, 79%, 80%, 81%, 82%, 83%, 84%, 85%, 86%, 87%, 88%, 89%, 90%, 91%, 92%, 93%, 94%, 95%, 96%, 97%, 98%, or 99% sequence identity to SEQ ID NO: 251.

[0282] Another nucleic acid variant useful in the methods of the invention is a nucleic acid capable of hybridising, under reduced stringency conditions, preferably under stringent conditions, with a nucleic acid encoding a GRP as defined herein, or with a portion as defined herein.

[0283] According to the present invention, there is provided a method for enhancing yield-related traits in plants, comprising introducing and expressing in a plant a nucleic acid capable of hybridizing to any one of the nucleic acids given in Table F of the Examples section, or comprising introducing and expressing in a plant a nucleic acid capable of hybridising to a nucleic acid encoding an orthologue, paralogue or homologue of any of the nucleic acid sequences given in Table F of the Examples section.

[0284] Hybridising sequences useful in the methods of the invention encode a GRP as defined herein, having substantially the same biological activity as the amino acid sequences given in Table F of the Examples section. Preferably, the hybridising sequence is capable of hybridising to the complement of any one of the nucleic acids given in Table F of the Examples section, or to a portion of any of these sequences, a portion being as defined above, or the hybridising sequence is capable of hybridising to the complement of a nucleic acid encoding an orthologue or paralogue of any one of the amino acid sequences given in Table F of the Examples section. Most preferably, the hybridising sequence is capable of hybridising to the complement of a nucleic acid as represented by SEQ ID NO: 250 or to a portion thereof.

[0285] Preferably, the hybridising sequence encodes a polypeptide with an amino acid sequence which has a motif having at least 70%, and for instance at least 75%, 80%, 85%, 90%, 95%, or 99% sequence identity to motif 7 as herein defined and/or which has at least 25%, and for instance at least 50%, 75%, 90%, or 95% sequence identity to SEQ ID NO: 251.

[0286] Another nucleic acid variant useful in the methods of the invention is a splice variant encoding a GRP as defined hereinabove, a splice variant being as defined herein.

[0287] According to the present invention, there is provided a method for enhancing yield-related traits in plants, comprising introducing and expressing in a plant a splice variant of any one of the nucleic acid sequences given in Table F of the Examples section, or a splice variant of a nucleic acid encoding an orthologue, paralogue or homologue of any of the amino acid sequences given in Table F of the Examples section.

[0288] Preferred splice variants are splice variants of a nucleic acid represented by SEQ ID NO: 250, or a splice variant of a nucleic acid encoding an orthologue or paralogue of SEQ ID NO: 251. Preferably, the amino acid sequence encoded by the splice variant has a motif having at least 70%, and for instance at least 75%, 80%, 85%, 90%, 95%, or 99% sequence identity to motif 7 as herein defined and/or has at least 25%, and for instance at least 50%, 75%, 90%, or 95% sequence identity to SEQ ID NO: 251.

[0289] Another nucleic acid variant useful in performing the methods of the invention is an allelic variant of a nucleic acid encoding a GRP as defined hereinabove, an allelic variant being as defined herein.

[0290] According to the present invention, there is provided a method for enhancing yield-related traits in plants, comprising introducing and expressing in a plant an allelic variant of any one of the nucleic acids given in Table F of the Examples section, or comprising introducing and expressing in a plant an allelic variant of a nucleic acid encoding an orthologue, paralogue or homologue of any of the amino acid sequences given in Table F of the Examples section.

[0291] The polypeptides encoded by allelic variants useful in the methods of the present invention have substantially the same biological activity as the GRP of SEQ ID NO: 251 and any of the amino acids depicted in Table F of the Examples section. Allelic variants exist in nature, and encompassed within the methods of the present invention is the use of these natural alleles. Preferably, the allelic variant is an allelic variant of SEQ ID NO: 250 or an allelic variant of a nucleic acid encoding an orthologue or paralogue of SEQ ID NO: 251. Preferably, the amino acid sequence encoded by the allelic variant has a motif having at least 70%, and for instance at least 75%, 80%, 85%, 90%, 95%, or 99% sequence identity to motif 7 as herein defined and/or has at least 25%, and for instance at least 50%, 75%, 90%, or 95% sequence identity to SEQ ID NO: 251.

[0292] Gene shuffling or directed evolution may also be used to generate variants of nucleic acids encoding GRP as defined above; the term “gene shuffling” being as defined herein.

[0293] According to the present invention, there is provided a method for enhancing yield-related traits in plants, comprising introducing and expressing in a plant a variant of any one of the nucleic acid sequences given in Table F of the Examples section, or comprising introducing and expressing in a plant a variant of a nucleic acid encoding an orthologue, paralogue or homologue of any of the amino acid sequences given in Table F of the Examples section, which variant nucleic acid is obtained by gene shuffling.

[0294] Preferably, the amino acid sequence encoded by the variant nucleic acid obtained by gene shuffling has a motif having at least 70%, and for instance at least 75%, 80%, 85%, 90%, 95%, or 99% sequence identity to motif 7 as herein defined and/or has at least 25%, and for instance at least 50%, 75%, 90%, or 95% sequence identity to SEQ ID NO: 251.

[0295] Furthermore, nucleic acid variants may also be obtained by site-directed mutagenesis. Several methods are available to achieve site-directed mutagenesis, the most common being PCR based methods (Current Protocols in Molecular Biology. Wiley Eds.).

[0296] Nucleic acids encoding GRP may be derived from any natural or artificial source. The nucleic acid may be modified from its native form in composition and/or genomic environment through deliberate human manipulation.

[0297] In an embodiment, the GRP-encoding nucleic acid is from a plant, further preferably from a monocotyledonous plant, more preferably from the family Poaceae, most preferably the nucleic acid is from Oryza sativa. In a preferred embodiment, said GRP-encoding nucleic acid encodes the polypeptide as represented by SEQ ID NO: 251.

[0298] In another embodiment, the GRP-encoding nucleic acid is from a plant, further preferably from a dicotyledonous plant, more preferably from the family Brassicaceae, most preferably the nucleic acid is from Arabidopsis thaliana. In another preferred embodiment, said GRP-encoding nucleic acid encodes a polypeptide as represented by any of SEQ ID NO: 275, 277 or 279, and preferably as represented by SEQ ID NO: 275.

[0299] Performance of the methods of the invention gives plants having enhanced yield-related traits. In one embodiment, reference herein to enhanced yield-related traits is taken to mean an increase in early vigour. Hence, in an embodiment, performance of the methods of the invention gives plants having early vigour relative to control plants.

[0300] In another embodiment, reference herein to enhanced yield-related traits is taken to mean an increase in biomass (weight) of one or more parts of a plant, which may include aboveground (harvestable) parts and/or (harvestable) parts below ground. In particular, such harvestable parts are seeds, and performance of the methods of the invention results in plants having increased seed yield relative to the seed yield of control plants.

[0301] In another embodiment, reference herein to enhanced yield-related traits is taken to mean an increase in yield, especially increased seed yield relative to control plants. The terms “yield” and “seed yield” are described in more detail in the “definitions” section herein. In a preferred embodiment, said increased seed yield is selected from any one or more of:
[0302] (i) increased harvest index;
[0303] (ii) increased total seed weight;
[0304] (iii) increased number of filled seeds;
[0305] (iv) number of flowers per panicle; and
[0306] (v) increased thousand kernel weight.

[0307] The present invention provides a method for increasing yield, especially seed yield of plants, relative to control plants, which method comprises modulating expression in a plant of a nucleic acid encoding a GRP as defined herein. In another embodiment, the present invention also provides a method for increasing biomass of plants, relative to control plants, which method comprises modulating expression in a plant of a nucleic acid encoding a GRP as defined herein. In yet another embodiment, the present invention also provides a method for increasing early vigour of plants, relative to control plants, which method comprises modulating expression in a plant of a nucleic acid encoding a GRP as defined herein. In another embodiment, according to the present invention, there is also provided a method for increasing the growth rate of plants, which method comprises modulating expression in a plant of a nucleic acid encoding a GRP polypeptide as defined herein.

[0308] Performance of the methods of the invention gives plants grown under non-stress conditions or under mild drought conditions increased yield relative to control plants grown under comparable conditions. Therefore, according to the present invention, there is provided a method for increasing yield in plants grown under non-stress conditions or under mild drought conditions, which method comprises modulating expression in a plant of a nucleic acid encoding a GRP as defined herein.

[0309] Performance of the methods of the invention gives plants grown under conditions of nutrient deficiency, particularly under conditions of nitrogen deficiency, increased yield relative to control plants grown under comparable conditions. Therefore, according to the present invention, there is provided a method for increasing yield in plants grown under conditions of nutrient deficiency, which method comprises modulating expression in a plant of a nucleic acid encoding a GRP as defined herein.

[0310] Performance of the methods of the invention gives plants grown under conditions of salt stress, increased yield relative to control plants grown under comparable conditions. Therefore, according to the present invention, there is provided a method for increasing yield in plants grown under conditions of salt stress, which method comprises modulating expression in a plant of a nucleic acid encoding a GRP as defined herein.

[0311] The invention also provides genetic constructs and vectors to facilitate introduction and/or expression in plants of nucleic acids encoding growth related polypeptides. The gene constructs may be inserted into vectors, which may be commercially available, suitable for transforming into plants and suitable for expression of the gene of interest in the transformed cells. The invention also provides use of a gene construct as defined herein in the methods of the invention.

[0312] More specifically, the present invention provides a construct comprising:
[0313] (a) a nucleic acid encoding a GRP as defined above;
[0314] (b) one or more control sequences capable of driving expression of the nucleic acid sequence of (a); and optionally
[0315] (c) a transcription termination sequence.

[0316] Preferably, the nucleic acid encoding a GRP is as defined above. The term “control sequence” and “termination sequence” are as defined herein.

[0317] The invention furthermore provides plants transformed with a construct as described above. In particular, the invention provides plants transformed with a construct as described above, which plants have increased yield-related traits as described herein.

[0318] In another embodiment, the invention also relates to the use of a construct as given herein in a method for making plants having enhanced yield-related traits, preferably yield-related traits as defined herein, relative to control plants. Preferably said use involves a step of introducing in a plant, plant part or plant cell plant of a construct as given above.

[0319] Plants are transformed with a vector comprising any of the nucleic acids described above. The skilled artisan is well aware of the genetic elements that must be present on the vector in order to successfully transform, select and propagate host cells containing the sequence of interest. The sequence of interest is operably linked to one or more control sequences, e.g. at least to a promoter.

[0320] Advantageously, any type of promoter, whether natural or synthetic, may be used to drive expression of the nucleic acid sequence, but preferably the promoter is of plant origin. A constitutive promoter is particularly useful in the methods. Preferably the constitutive promoter is a ubiquitous constitutive promoter of medium strength. See the “Definitions” section herein for definitions of the various promoter types.

[0321] It should be clear that the applicability of the present invention is not restricted to a GRP-encoding nucleic acid represented by SEQ ID NO: 250, nor is the applicability of the invention restricted to expression of a GRP-encoding nucleic acid when driven by a constitutive promoter.

[0322] The constitutive promoter is preferably a medium strength promoter. More preferably it is a plant derived promoter, such as a GOS2 promoter or a promoter of substantially the same strength and having substantially the same expression pattern (a functionally equivalent promoter). More preferably the promoter is the GOS2 promoter from rice. Further preferably the constitutive promoter is represented by a nucleic acid sequence substantially similar to SEQ ID NO: 744, most preferably the constitutive promoter is as represented by SEQ ID NO: 744. See the “Definitions” section herein for further examples of constitutive promoters.

[0323] Optionally, one or more terminator sequences may be used in the construct introduced into a plant. Preferably, the construct comprises an expression cassette comprising a GOS2 promoter, substantially similar to SEQ ID NO: 744, and the nucleic acid encoding the GRP. More preferably, the expression cassette comprises the sequence represented by SEQ ID NO: 745 (pGOS2::GRP::terminator). Furthermore, one or more sequences encoding selectable markers may be present on the construct introduced into a plant.

[0324] According to a preferred feature of the invention, the modulated expression is increased expression. Methods for increasing expression of nucleic acids or genes, or gene products, are well documented in the art and examples are provided in the definitions section.

[0325] As mentioned above, a preferred method for modulating expression of a nucleic acid encoding a GRP as given herein is by introducing and expressing in a plant a nucleic acid encoding a GRP as given herein; however the effects of performing the method, i.e. enhancing yield-related traits may also be achieved using other well known techniques, including but not limited to T-DNA activation tagging, TILLING, homologous recombination. A description of these techniques is provided in the definitions section.

[0326] The invention also provides a method for the production of transgenic plants having enhanced yield-related traits relative to control plants, comprising introduction and expression in a plant of any nucleic acid encoding a GRP as defined hereinabove.

[0327] More specifically, the present invention provides a method for the production of transgenic plants having enhanced yield-related traits, preferably such as those mentioned above, which method comprises:
[0328] (i) introducing and expressing in a plant or plant cell a GRP-encoding nucleic acid or a genetic construct comprising a GRP-encoding nucleic acid; and
[0329] (ii) cultivating the plant cell under conditions promoting plant growth and development.

[0330] Cultivating the plant cell under conditions promoting plant growth and development, may or may not include regeneration and or growth to maturity.

[0331] The nucleic acid of (i) may be any of the nucleic acids capable of encoding a GRP as defined herein.

[0332] The nucleic acid may be introduced directly into a plant cell or into the plant itself (including introduction into a tissue, organ or any other part of a plant). According to a preferred feature of the present invention, the nucleic acid is preferably introduced into a plant by transformation. The term “transformation” is described in more detail in the “definitions” section herein.

[0333] The present invention clearly extends to any plant cell or plant produced by any of the methods described herein, and to all plant parts and propagules thereof. The present invention encompasses plants or parts thereof including seeds obtainable by the methods according to the present invention. The plants or parts thereof comprise a nucleic acid transgene encoding a GRP as defined above. The present invention extends further to encompass the progeny of a primary transformed or transfected cell, tissue, organ or whole plant that has been produced by any of the aforementioned methods, the only requirement being that progeny exhibit the same genotypic and/or phenotypic characteristic(s) as those produced by the parent in the methods according to the invention.

[0334] The invention also includes host cells containing an isolated nucleic acid encoding a GRP as defined hereinabove. Preferred host cells according to the invention are plant cells. Host plants for the nucleic acids or the vector used in the method according to the invention, the expression cassette or construct or vector are, in principle, advantageously all plants, which are capable of synthesizing the polypeptides used in the inventive method.

[0335] In a preferred embodiment a growth-related polypeptide encoded by a nucleic acid according to the invention that has been introduced and expressed in a transgenic plant cell, plant part or plant when applying methods as described herein, may be present in all compartments of the plant cell including the cytosol. In a preferred embodiment, said growth-related polypeptide is located mitochondria or in chloroplast.

[0336] The methods of the invention are advantageously applicable to any plant, in particular to any plant as defined herein. Plants that are particularly useful in the methods of the invention include all plants which belong to the superfamily Viridiplantae, in particular monocotyledonous and dicotyledonous plants including fodder or forage legumes, ornamental plants, food crops, trees or shrubs.

[0337] According to an embodiment of the present invention, the plant is a crop plant. Examples of crop plants include but are not limited to chicory, carrot, cassava, trefoil, soybean, beet, sugar beet, sunflower, canola, alfalfa, rapeseed, linseed, cotton, tomato, potato and tobacco.

[0338] According to another embodiment of the present invention, the plant is a monocotyledonous plant. Examples of monocotyledonous plants include sugarcane.

[0339] According to another embodiment of the present invention, the plant is a cereal. Examples of cereals include rice, maize, wheat, barley, millet, rye, triticale, sorghum, emmer, spelt, secale, einkorn, teff, milo and oats.

[0340] The invention also extends to harvestable parts of a plant such as, but not limited to seeds, leaves, fruits, flowers, stems, roots, rhizomes, tubers and bulbs, which harvestable parts comprise a recombinant nucleic acid encoding a GRP. The invention furthermore relates to products derived, preferably directly derived, from a harvestable part of such a plant, such as dry pellets or powders, oil, fat and fatty acids, starch or proteins.

[0341] The present invention also encompasses use of nucleic acids encoding growth-related polypeptides as described herein and use of these polypeptides in enhancing any of the aforementioned yield-related traits in plants. For example, nucleic acids encoding a GRP described herein, or the GRP themselves, may find use in breeding programmes in which a DNA marker is identified which may be genetically linked to a GRP polypeptide-encoding gene. The nucleic acids/genes, or the GRP polypeptides themselves may be used to define a molecular marker. This DNA or protein marker may then be used in breeding programmes to select plants having enhanced yield-related traits as defined hereinabove in the methods of the invention. Furthermore, allelic variants of a GRP-encoding nucleic acid/gene may find use in marker-assisted breeding programmes. Nucleic acids encoding GRP may also be used as probes for genetically and physically mapping the genes that they are a part of, and as markers for traits linked to those genes. Such information may be useful in plant breeding in order to develop lines with desired phenotypes.

[0342] In another embodiment the invention relates to the use of a nucleic acid encoding a polypeptide as defined herein for enhancing yield-related traits in plants and preferably wherein said yield-related traits are as defined in herein relative to control plants. Preferably said use involves a step of introducing in a plant, plant part or plant cell of such nucleic acid as defined herein.

[0343] A “ZPR polypeptide” as defined herein refers to any polypeptide comprising a Leucine Zipper (ZIP) domain, and preferably comprises a Leucine Zipper (ZIP) domain that is six heptads in length.

[0344] The terms “domain”, “signature” and “motif” are defined in the “definitions” section herein.

[0345] ZPR proteins have high amino acid sequence similarities to the class III homeodomain-leucin zipper transcription factors (HD-ZIP IIIs). However, the small proteins, designated little zippers (ZPRs), are structurally unique from the HD-ZIP IIIs and other known transcription factors in that they have only the ZIP motif, which mediates protein-protein interactions, but lack the DNA-binding basic sequence region and the C-terminal activation domain (Wenkel et al. 2007). It is therefore unlikely that the ZPR proteins are functional transcription factors belonging to the HD-ZIP III subfamily.

[0346] In particular, in an embodiment, a ZPR protein as defined herein comprise a Leucine Zipper domain, herein also named ZIP or L-ZIP motif, similar to the leucine zipper domain present in HD-ZIPIII proteins (Wenkel et al. 2007). According to another embodiment, a ZPR protein as defined herein comprises a Leucine Zipper (ZIP) domain which is six heptads in length.

[0347] A leucine zipper is a common three-dimensional structural motif in proteins. The leucine zipper is a super-secondary structure that functions as a dimerization domain, and its presence generates adhesion forces in parallel alpha helices. (Landschulz et al., 1988, Science 240: 1759-1764). Leucine zipper domains are coiled-coil domains consisting of heptad repeats with a Leu residue in the “d” position (Landschulz et al., 1988). A single leucine zipper consists of multiple leucine residues at approximately 7-residue intervals, which forms an amphipathic alpha helix with a hydrophobic region running along one side. This hydrophobic region provides an area for dimerization, allowing the motifs to “zip” together. The main feature of the leucine zipper domain is the predominance of the common amino acid leucine at the d position of the heptad repeat. Each half of a leucine zipper consists of a short alpha-helix with a leucine residue at every seventh position. The standard 3.6-residues-per-turn alpha-helix structure changes slightly to become a 3.5-residues-per-turn alpha-helix. Known also as the heptad repeat, one leucine comes in direct contact with another leucine on the other strand every second turn.

[0348] The terms “heptad” and “heptad repeat” are used herein as synonyms and both refer to a structural motif that consists of a repeating pattern of seven amino acids. A heptad repeat can be schematically represented as follows: HPPHCPC, where H represents hydrophobic residues; C represents, typically, charged residues, and P represents polar and, therefore, hydrophilic residues. The positions of the heptad repeat are commonly denoted by the lowercase letters a through g. As indicated above, leucine zipper motifs predominantly have leucine in the d position of the heptad repeat (Landschulz et al., 1988).

[0349] In another embodiment, said leucine zipper domain comprises an amino acid sequence having at least 50%, 51%, 52%, 53%, 54%, 55%, 56%, 57%, 58%, 59%, 60%, 61%, 62%, 63%, 64%, 65%, 66%, 67%, 68%, 69%, 70%, 71%, 72%, 73%, 74%, 75%, 76%, 77%, 78%, 79%, 80%, 81%, 82%, 83%, 84%, 85%, 86%, 87%, 88%, 89%, 90%, 91%, 92%, 93%, 94%, 95%, 96%, 97%, 98%, 99% or 100% overall sequence identity to the amino acid sequence represented by SEQ ID NO: 936. In other words, in another embodiment a method is provided wherein said ZPR polypeptide comprises a conserved domain (or motif) with at least 50%, 51%, 52%, 53%, 54%, 55%, 56%, 57%, 58%, 59%, 60%, 61%, 62%, 63%, 64%, 65%, 66%, 67%, 68%, 69%, 70%, 71%, 72%, 73%, 74%, 75%, 76%, 77%, 78%, 79%, 80%, 81%, 82%, 83%, 84%, 85%, 86%, 87%, 88%, 89%, 90%, 91%, 92%, 93%, 94%, 95%, 96%, 97%, 98%, 99% or 100% sequence identity to the conserved domain starting with amino acid 59 up to and including amino acid 100 in SEQ ID NO:747.

[0350] ZPR proteins are structurally similar in that they possess a leucine zipper domain as described above. However ZPR proteins vary in the placement of the leucine zipper domain within the protein. For instance, in Arabidopsis, phylogenetic analysis (see FIG. 11 taken from Wenkel et al. 2007) revealed that ZPR proteins can be classified into two distinct groups. Class A proteins are ZPR1/2 like proteins and contain the leucine zipper domain centrally to C-terminally. This group includes ZPR1 and ZPR2. Class B proteins are ZPR3/4 like proteins and includes ZPR3 and ZPR4; they comprises the leucine zipper domain located in the N-terminal regions of ZPR3 and ZPR4 (see FIG. 10 taken from Wenkel et al. 2007). Moreover, both types of ZPR proteins, ZPR1/ZPR2 types and ZPR3/ZPR4 types, are present in rice and maize as well as in Arabidopsis, indicating that the two types of ZPR genes diverged prior to the split between monocots and eudicots (Wenkel et al. 2007).

[0351] In a preferred embodiment, the ZPR polypeptide sequence which when used in the construction of a phylogenetic tree such as the one shown in FIG. 11, clusters with the group ZPR1/ZPR2 types of ZPR polypeptides that comprise said leucine zipper domain in the central to C-terminal region of said ZPR polypeptides. In addition, preferably said ZPR polypeptide sequence clusters with the group of ZPR polypeptides that comprises the amino acid sequence represented by SEQ ID NO: 747 rather than with any other group.

[0352] In an embodiment, a ZPR polypeptide according to the invention comprises one or more of the following motifs:

(i)
(SEQ ID NO: 929)
Motif 8: II[EK]ENE[KR]LR[KE][KR]A[LS][LA]L[HR][QR]
EN,
(ii)
(SEQ ID NO: 930)
Motif 9: [EI]M[EK][MI]KNLKLY[EML]EN[KQ][SCI],
(iii)
(SEQ ID NO: 931)
Motif 10: [QKL][AD]L[LF][ST][QE][LI][QI][KQ][KQ]
[LI]SxPx

[0353] Motifs 8 to 10 can be found in ZPR polypeptides belonging to both of the above-mentioned phylogenic groups.

[0354] In another embodiment, a ZPR polypeptide according to the invention further comprises one or more of the following motifs:

(i)
(SEQ ID NO: 932)
Motif 11: K[VL][KA]K[EI]M[EK]MKNLKLY[MEL]EN[QKR]
[SIC]I[IL]EENE[KR]LR[KE][KRQ]A[LS][LA]L[HR][QR]EN
[LKQ][AD]L[LF][STQ][QI][LI][QI][KQN][KQ][IF]S,
(ii)
(SEQ ID NO: 933)
Motif 12: MC[HS][AG][SI]Sx[HS][LS][ES]S,
(iii)
(SEQ ID NO: 934)
Motif 13: [VI][HS][RV]L[NK][LR]RR

[0355] Motifs 11 to 13 can be found in ZPR polypeptides belonging to the above-mentioned phylogenic group of ZPR1/ZPR2 types of ZPR polypeptides.

[0356] Motifs 8 to 13 as provided herein are based on and were derived using the MEME algorithm (Bailey and Elkan, Proceedings of the Second International Conference on Intelligent Systems for Molecular Biology, pp. 28-36, AAAI Press, Menlo Park, Calif., 1994). At each position within a MEME motif, the residues are shown that are present in the query set of sequences with a frequency higher than 0.2. Residues within square brackets represent alternatives.

[0357] More preferably, the ZPR polypeptide comprises in increasing order of preference, at least 2, at least 3, at least 4, at least 5, or all 6 motifs.

[0358] The term “ZPR” or “ZPR polypeptide” or “ZPR protein” as used herein also intends to include homologues as defined hereunder of “ZPR polypeptide”.

[0359] Additionally or alternatively, the homologue of a ZPR protein has in increasing order of preference at least 25%, 26%, 27%, 28%, 29%, 30%, 31%, 32%, 33%, 34%, 35%, 36%, 37%, 38%, 39%, 40%, 41%, 42%, 43%, 44%, 45%, 46%, 47%, 48%, 49%, 50%, 51%, 52%, 53%, 54%, 55%, 56%, 57%, 58%, 59%, 60%, 61%, 62%, 63%, 64%, 65%, 66%, 67%, 68%, 69%, 70%, 71%, 72%, 73%, 74%, 75%, 76%, 77%, 78%, 79%, 80%, 81%, 82%, 83%, 84%, 85%, 86%, 87%, 88%, 89%, 90%, 91%, 92%, 93%, 94%, 95%, 96%, 97%, 98%, or 99% overall sequence identity to the amino acid represented by SEQ ID NO: 747, provided that the homologous protein comprises any one or more of the conserved motifs as outlined above. The overall sequence identity is determined using a global alignment algorithm, such as the Needleman Wunsch algorithm in the program GAP (GCG Wisconsin Package, Accelrys), preferably with default parameters and preferably with sequences of mature proteins (i.e. without taking into account secretion signals or transit peptides). Compared to overall sequence identity, the sequence identity will generally be higher when only conserved domains or motifs are considered. Preferably the motifs in a ZPR polypeptide have, in increasing order of preference, at least 70%, 71%, 72%, 73%, 74%, 75%, 76%, 77%, 78%, 79%, 80%, 81%, 82%, 83%, 84%, 85%, 86%, 87%, 88%, 89%, 90%, 91%, 92%, 93%, 94%, 95%, 96%, 97%, 98%, or 99% sequence identity to any one or more of the motifs represented by SEQ ID NO: 929 to SEQ ID NO: 934 (Motifs 8 to 13).

[0360] Homeodomain-leucine zipper (HD-ZIPIII) proteins activate transcription of the ZPR genes. The ZPR proteins then form heterodimers with the HD-ZIPIII proteins (Wenkel et al. 2007). Tools and techniques for measuring or determining activation of ZPR transcription are well known in the art. Further details are provided in Example 26.

[0361] In addition, ZPR polypeptides, when expressed in rice according to the methods of the present invention as outlined in Examples 27 and 28, give plants having increased yield related traits, in particular increased yield, and more particularly increased seed yield. In an embodiment, said increased seed yield relative to control plants comprises any one or more of increased fill rate, increased total seed weight, increased harvest index and increased number of filled seeds.

[0362] The present invention is illustrated by transforming plants with the nucleic acid sequence represented by SEQ ID NO: 746, encoding the polypeptide sequence of SEQ ID NO: 747. However, performance of the invention is not restricted to these sequences; the methods of the invention may advantageously be performed using any ZPR-encoding nucleic acid or ZPR polypeptide as defined herein.

[0363] Examples of nucleic acids encoding ZPR polypeptides are given in Table J of the Examples section herein. Such nucleic acids are useful in performing the methods of the invention. The amino acid sequences given in Table J of the Examples section includes example sequences of orthologues and paralogues of the ZPR polypeptide represented by SEQ ID NO: 747, the terms “orthologues” and “paralogues” being as defined herein. Further orthologues and paralogues may readily be identified by performing a so-called reciprocal blast search as described in the definitions section; where the query sequence is SEQ ID NO: 746 or SEQ ID NO: 747, the second BLAST (back-BLAST) would be against tomato sequences.

[0364] The invention also provides hitherto unknown ZPR-encoding nucleic acids and ZPR polypeptides useful for conferring enhanced yield-related traits as defined herein in plants relative to control plants.

[0365] According to one further embodiment of the present invention, there is therefore provided an isolated nucleic acid molecule selected from:
[0366] (i) a nucleic acid represented by any one of SEQ ID NO: 748, 790, 792, 862, 864, 870, 878, 902, 912, and 918;
[0367] (ii) the complement of a nucleic acid represented by any one of SEQ ID NO: 748, 790, 792, 862, 864, 870, 878, 902, 912, and 918;
[0368] (iii) a nucleic acid encoding a ZPR polypeptide having in increasing order of preference at least 50%, 51%, 52%, 53%, 54%, 55%, 56%, 57%, 58%, 59%, 60%, 61%, 62%, 63%, 64%, 65%, 66%, 67%, 68%, 69%, 70%, 71%, 72%, 73%, 74%, 75%, 76%, 77%, 78%, 79%, 80%, 81%, 82%, 83%, 84%, 85%, 86%, 87%, 88%, 89%, 90%, 91%, 92%, 93%, 94%, 95%, 96%, 97%, 98%, or 99% sequence identity to the amino acid sequence represented any one of SEQ ID NO: 749, 791, 793, 863, 865, 871, 879, 903, 913, and 919; and additionally or alternatively comprising one or more motifs having in increasing order of preference at least 50%, 55%, 60%, 65%, 70%, 75%, 80%, 85%, 90%, 95%, 96%, 97%, 98%, 99% or more sequence identity to any one or more of the motifs 8 to 13 as given in SEQ ID NO: 929 to SEQ ID NO: 934, and further preferably conferring enhanced yield-related traits relative to control plants;
[0369] (iv) a nucleic acid encoding a ZPR polypeptide having in increasing order of preference at least 50%, 51%, 52%, 53%, 54%, 55%, 56%, 57%, 58%, 59%, 60%, 61%, 62%, 63%, 64%, 65%, 66%, 67%, 68%, 69%, 70%, 71%, 72%, 73%, 74%, 75%, 76%, 77%, 78%, 79%, 80%, 81%, 82%, 83%, 84%, 85%, 86%, 87%, 88%, 89%, 90%, 91%, 92%, 93%, 94%, 95%, 96%, 97%, 98%, or 99% sequence identity to the amino acid sequence represented any one of SEQ ID NO: 878, 902, 912, and 918; and additionally or alternatively comprising one or more motifs having in increasing order of preference at least 50%, 55%, 60%, 65%, 70%, 75%, 80%, 85%, 90%, 95%, 96%, 97%, 98%, 99% or more sequence identity to any one or more of the motifs 8 to 10 as given in SEQ ID NO: 929 to SEQ ID NO: 931, and further preferably conferring enhanced yield-related traits relative to control plants.
[0370] (v) a nucleic acid molecule which hybridizes with a nucleic acid molecule of (i) to (iv) under high stringency hybridization conditions and preferably confers enhanced yield-related traits relative to control plants.

[0371] According to another further embodiment of the present invention, there is also provided an isolated polypeptide selected from:
[0372] (i) an amino acid sequence represented by any one of SEQ ID NO: 749, 791, 793, 863, 865, 871, 879, 903, 913, and 919;
[0373] (ii) an amino acid sequence having, in increasing order of preference, at least 25%, 26%, 27%, 28%, 29%, 30%, 31%, 32%, 33%, 34%, 35%, 36%, 37%, 38%, 39%, 40%, 41%, 42%, 43%, 44%, 45%, 46%, 47%, 48%, 49%, 50%, 51%, 52%, 53%, 54%, 55%, 56%, 57%, 58%, 59%, 60%, 61%, 62%, 63%, 64%, 65%, 66%, 67%, 68%, 69%, 70%, 71%, 72%, 73%, 74%, 75%, 76%, 77%, 78%, 79%, 80%, 81%, 82%, 83%, 84%, 85%, 86%, 87%, 88%, 89%, 90%, 91%, 92%, 93%, 94%, 95%, 96%, 97%, 98%, or 99% sequence identity to the amino acid sequence represented by SEQ ID NO: 749, 791, 793, 863, 865, and 871; and additionally or alternatively comprising one or more motifs having in increasing order of preference at least 50%, 55%, 60%, 65%, 70%, 75%, 80%, 85%, 90%, 95%, 96%, 97%, 98%, 99% or more sequence identity to any one or more of the motifs 8 to 13 given in SEQ ID NO: 929 to SEQ ID NO: 934, and further preferably conferring enhanced yield-related traits relative to control plants;
[0374] (iii) an amino acid sequence having, in increasing order of preference at least 25%, 26%, 27%, 28%, 29%, 30%, 31%, 32%, 33%, 34%, 35%, 36%, 37%, 38%, 39%, 40%, 41%, 42%, 43%, 44%, 45%, 46%, 47%, 48%, 49%, 50%, 51%, 52%, 53%, 54%, 55%, 56%, 57%, 58%, 59%, 60%, 61%, 62%, 63%, 64%, 65%, 66%, 67%, 68%, 69%, 70%, 71%, 72%, 73%, 74%, 75%, 76%, 77%, 78%, 79%, 80%, 81%, 82%, 83%, 84%, 85%, 86%, 87%, 88%, 89%, 90%, 91%, 92%, 93%, 94%, 95%, 96%, 97%, 98%, or 99% sequence identity to the amino acid sequence represented by SEQ ID NO: 879, 903, 913, and 919; and additionally or alternatively comprising one or more motifs having in increasing order of preference at least 50%, 55%, 60%, 65%, 70%, 75%, 80%, 85%, 90%, 95%, 96%, 97%, 98%, 99% or more sequence identity to any one or more of the motifs 8 to 10 given in SEQ ID NO: 929 to SEQ ID NO: 931 and further preferably conferring enhanced yield-related traits relative to control plants;
[0375] (iv) derivatives of any of the amino acid sequences given in (i) to (iii) above.

[0376] Nucleic acid variants may also be useful in practicing the methods of the invention. Examples of such variants include nucleic acids encoding homologues and derivatives of any one of the amino acid sequences given in Table J of the Examples section, the terms “homologue” and “derivative” being as defined herein. Also useful in the methods of the invention are nucleic acids encoding homologues and derivatives of orthologues or paralogues of any one of the amino acid sequences given in Table J of the Examples section. Homologues and derivatives useful in the methods of the present invention have substantially the same biological and functional activity as the unmodified protein from which they are derived. Further variants useful in practicing the methods of the invention are variants in which codon usage is optimised or in which miRNA target sites are removed.

[0377] Further nucleic acid variants useful in practicing the methods of the invention include portions of nucleic acids encoding ZPR polypeptides, nucleic acids hybridising to nucleic acids encoding ZPR polypeptides, splice variants of nucleic acids encoding ZPR polypeptides, allelic variants of nucleic acids encoding ZPR polypeptides and variants of nucleic acids encoding ZPR polypeptides obtained by gene shuffling. The terms hybridising sequence, splice variant, allelic variant and gene shuffling are as described herein.

[0378] Nucleic acids encoding ZPR polypeptides need not be full-length nucleic acids, since performance of the methods of the invention does not rely on the use of full-length nucleic acid sequences. According to the present invention, there is provided a method for enhancing yield-related traits in plants, comprising introducing and expressing in a plant a portion of any one of the nucleic acid sequences given in Table J of the Examples section, or a portion of a nucleic acid encoding an orthologue, paralogue or homologue of any of the amino acid sequences given in Table J of the Examples section.

[0379] A portion of a nucleic acid may be prepared, for example, by making one or more deletions to the nucleic acid. The portions may be used in isolated form or they may be fused to other coding (or non-coding) sequences in order to, for example, produce a protein that combines several activities. When fused to other coding sequences, the resultant polypeptide produced upon translation may be bigger than that predicted for the protein portion.

[0380] Portions useful in the methods of the invention, encode a ZPR polypeptide as defined herein, and have substantially the same biological activity as the amino acid sequences given in Table J of the Examples section. Preferably, the portion is a portion of any one of the nucleic acids given in Table J of the Examples section, or is a portion of a nucleic acid encoding an orthologue or paralogue of any one of the amino acid sequences given in Table J of the Examples section. Preferably the portion is at least 150, 175, 200, 225, 250, 275, 300, 325, 350, 375, 400, 425, 450, 475, 500, 525, 530, or 537 consecutive nucleotides in length, the consecutive nucleotides being of any one of the nucleic acid sequences given in Table J of the Examples section, or of a nucleic acid encoding an orthologue or paralogue of any one of the amino acid sequences given in Table J of the Examples section. Most preferably the portion is a portion of the nucleic acid of SEQ ID NO: 746. Preferably, the portion encodes a fragment of an amino acid sequence which has one or more of the following characteristics:
[0381] when used in the construction of a phylogenetic tree, such as the one depicted in FIG. 11, clusters with the group of ZPR1/2 like polypeptides comprising the amino acid sequence represented by SEQ ID NO: 747 rather than with any other group;
[0382] comprises any one or more of the motifs 8 to 13 as provided herein,
[0383] has HD-ZIPIII-suppressing activity, and
[0384] has at least 25% sequence identity to SEQ ID NO: 747.

[0385] Another nucleic acid variant useful in the methods of the invention is a nucleic acid capable of hybridising, under reduced stringency conditions, preferably under stringent conditions, with a nucleic acid encoding a POI polypeptide as defined herein, or with a portion as defined herein.

[0386] According to the present invention, there is provided a method for enhancing yield-related traits in plants, comprising introducing and expressing in a plant a nucleic acid capable of hybridizing to any one of the nucleic acids given in Table J of the Examples section, or comprising introducing and expressing in a plant a nucleic acid capable of hybridising to a nucleic acid encoding an orthologue, paralogue or homologue of any of the nucleic acid sequences given in Table J of the Examples section.

[0387] Hybridising sequences useful in the methods of the invention encode a ZPR polypeptide as defined herein, having substantially the same biological activity as the amino acid sequences given in Table J of the Examples section. Preferably, the hybridising sequence is capable of hybridising to the complement of any one of the nucleic acids given in Table J of the Examples section, or to a portion of any of these sequences, a portion being as defined above, or the hybridising sequence is capable of hybridising to the complement of a nucleic acid encoding an orthologue or paralogue of any one of the amino acid sequences given in Table J of the Examples section. Most preferably, the hybridising sequence is capable of hybridising to the complement of a nucleic acid as represented by SEQ ID NO: 746 or to a portion thereof.

[0388] Preferably, the hybridising sequence encodes a polypeptide with an amino acid sequence which has one or more of the following characteristics:
[0389] when used in the construction of a phylogenetic tree, such as the one depicted in FIG. 11, clusters with the group of ZPR1/2 like polypeptides comprising the amino acid sequence represented by SEQ ID NO: 747 rather than with any other group;
[0390] comprises any one or more of the motifs 8 to 13 as provided herein,
[0391] has HD-ZIPIII-suppressing activity, and
[0392] has at least 25% sequence identity to SEQ ID NO: 747.

[0393] Another nucleic acid variant useful in the methods of the invention is a splice variant encoding a ZPRI polypeptide as defined hereinabove, a splice variant being as defined herein.

[0394] According to the present invention, there is provided a method for enhancing yield-related traits in plants, comprising introducing and expressing in a plant a splice variant of any one of the nucleic acid sequences given in Table J of the Examples section, or a splice variant of a nucleic acid encoding an orthologue, paralogue or homologue of any of the amino acid sequences given in Table J of the Examples section.

[0395] Preferred splice variants are splice variants of a nucleic acid represented by SEQ ID NO: 746, or a splice variant of a nucleic acid encoding an orthologue or paralogue of SEQ ID NO: 747. Preferably, the amino acid sequence encoded by the splice variant, has one or more of the following characteristics:
[0396] when used in the construction of a phylogenetic tree, such as the one depicted in FIG. 11, clusters with the group of ZPR1/2 like polypeptides comprising the amino acid sequence represented by SEQ ID NO: 747 rather than with any other group;
[0397] comprises any one or more of the motifs 8 to 13 as provided herein,
[0398] has HD-ZIPIII-suppressing activity, and
[0399] has at least 25% sequence identity to SEQ ID NO: 747.

[0400] Another nucleic acid variant useful in performing the methods of the invention is an allelic variant of a nucleic acid encoding a ZPR polypeptide as defined hereinabove, an allelic variant being as defined herein.

[0401] According to the present invention, there is provided a method for enhancing yield-related traits in plants, comprising introducing and expressing in a plant an allelic variant of any one of the nucleic acids given in Table J of the Examples section, or comprising introducing and expressing in a plant an allelic variant of a nucleic acid encoding an orthologue, paralogue or homologue of any of the amino acid sequences given in Table J of the Examples section.

[0402] The polypeptides encoded by allelic variants useful in the methods of the present invention have substantially the same biological activity as the ZPR polypeptide of SEQ ID NO: 747 and any of the amino acids depicted in Table J of the Examples section. Allelic variants exist in nature, and encompassed within the methods of the present invention is the use of these natural alleles. Preferably, the allelic variant is an allelic variant of SEQ ID NO: 746 or an allelic variant of a nucleic acid encoding an orthologue or paralogue of SEQ ID NO: 747. Preferably, the amino acid sequence encoded by the allelic variant, has one or more of the following characteristics:
[0403] when used in the construction of a phylogenetic tree, such as the one depicted in FIG. 11, clusters with the group of ZPR1/2 like polypeptides comprising the amino acid sequence represented by SEQ ID NO: 747 rather than with any other group;
[0404] comprises any one or more of the motifs 8 to 13 as provided herein,
[0405] has HD-ZIPIII-suppressing activity, and
[0406] has at least 25% sequence identity to SEQ ID NO: 747.

[0407] Gene shuffling or directed evolution may also be used to generate variants of nucleic acids encoding ZPR polypeptides as defined above; the term “gene shuffling” being as defined herein.

[0408] According to the present invention, there is provided a method for enhancing yield-related traits in plants, comprising introducing and expressing in a plant a variant of any one of the nucleic acid sequences given in Table J of the Examples section, or comprising introducing and expressing in a plant a variant of a nucleic acid encoding an orthologue, paralogue or homologue of any of the amino acid sequences given in Table J of the Examples section, which variant nucleic acid is obtained by gene shuffling.

[0409] Preferably, the amino acid sequence encoded by the variant nucleic acid obtained by gene shuffling, has one or more of the following characteristics:
[0410] when used in the construction of a phylogenetic tree, such as the one depicted in FIG. 11, clusters with the group of ZPR1/2 like polypeptides comprising the amino acid sequence represented by SEQ ID NO: 747 rather than with any other group;
[0411] comprises any one or more of the motifs 8 to 13 as provided herein,
[0412] has HD-ZIPIII-suppressing activity, and
[0413] has at least 25% sequence identity to SEQ ID NO: 747.

[0414] Furthermore, nucleic acid variants may also be obtained by site-directed mutagenesis. Several methods are available to achieve site-directed mutagenesis, the most common being PCR based methods (Current Protocols in Molecular Biology. Wiley Eds.).

[0415] Nucleic acids encoding ZPR polypeptides may be derived from any natural or artificial source. The nucleic acid may be modified from its native form in composition and/or genomic environment through deliberate human manipulation.

[0416] Preferably the ZPR polypeptide-encoding nucleic acid is from a plant, further preferably from a dicotyledonous plant, more preferably from the family Solanaceae. In a particularly preferred embodiment, said ZPR polypeptide-encoding nucleic acid is from the genus Solanum, most preferably from Solanum lycopersicum (synonym: Lycopersicum esculentum).

[0417] In another preferred embodiment, said ZPR polypeptide-encoding nucleic acid is from a plant, further preferably from a dicotyledonous plant, more preferably from the family Salicaceae, preferably from the genus Populus, most preferably from Populus trichocarpa.

[0418] Performance of the methods of the invention gives plants having enhanced yield-related traits. In particular performance of the methods of the invention gives plants having increased yield, especially increased seed yield relative to control plants. The terms “yield” and “seed yield” are described in more detail in the “definitions” section herein.

[0419] Reference herein to enhanced yield-related traits is taken to mean an increase in biomass (weight) of one or more parts of a plant, which may include (i) aboveground parts and preferably aboveground harvestable parts and/or (ii) parts below ground and preferably harvestable below ground. In particular, such harvestable parts are seeds, and performance of the methods of the invention results in plants having increased seed yield relative to the seed yield of control plants.

[0420] The present invention provides a method for increasing yield-related traits, particularly yield, more particularly seed yield of plants, relative to control plants, which method comprises modulating expression in a plant of a nucleic acid encoding a ZPR polypeptide as defined herein.

[0421] According to a preferred feature of the present invention, performance of the methods of the invention gives plants having an increased growth rate relative to control plants. Therefore, according to the present invention, there is provided a method for increasing the growth rate of plants, which method comprises modulating expression in a plant of a nucleic acid encoding a ZPR polypeptide as defined herein.

[0422] The methods of the present invention may be performed under non-stress conditions or under stress conditions as defined above.

[0423] In an embodiment, the methods of the present invention are performed under non-stress conditions.

[0424] For instance, performance of the methods of the invention gives plants grown under non-stress conditions or under mild drought conditions increased yield relative to control plants grown under comparable conditions. Therefore, according to the present invention, there is provided a method for increasing yield, preferably seed yield, in plants grown under non-stress conditions or under mild drought conditions, which method comprises modulating expression in a plant of a nucleic acid encoding a ZPR polypeptide.

[0425] In another embodiment, the methods of the present invention are performed under stress conditions.

[0426] In an example, the methods of the present invention are performed under stress conditions such as drought. Performance of the methods of the invention gives plants that are grown under drought conditions increased yield-related traits as provided herein relative to control plants grown under comparable conditions. Therefore, according to the present invention, there is provided a method for increasing yield-related traits in plants grown under stress conditions, and in particular grown under drought conditions, which method comprises modulating expression in a plant of a nucleic acid encoding a ZPR polypeptide as defined herein.

[0427] In another example, performance of the methods of the invention gives plants grown under conditions of nutrient deficiency, particularly under conditions of nitrogen deficiency, increased yield-related traits as provided herein relative to control plants grown under comparable conditions. Therefore, according to the present invention, there is provided a method for increasing yield-related traits as provided herein in plants grown under conditions of nutrient deficiency, which method comprises modulating expression in a plant of a nucleic acid encoding a ZPR polypeptide.

[0428] In yet another example, performance of the methods of the invention gives plants grown under conditions of salt stress, increased yield-related traits as provided herein relative to control plants grown under comparable conditions. Therefore, according to the present invention, there is provided a method for increasing yield-related traits as provided herein in plants grown under conditions of salt stress, which method comprises modulating expression in a plant of a nucleic acid encoding a ZPR polypeptide.

[0429] The invention also provides genetic constructs and vectors to facilitate introduction and/or expression in plants of nucleic acids encoding ZPR polypeptides. The gene constructs may be inserted into vectors, which may be commercially available, suitable for transforming into plants and suitable for expression of the gene of interest in the transformed cells. The invention also provides use of a gene construct as defined herein in the methods of the invention.

[0430] More specifically, the present invention provides a construct comprising:
[0431] (a) a nucleic acid encoding a ZPR polypeptide as defined above;
[0432] (b) one or more control sequences capable of driving expression of the nucleic acid sequence of (a); and optionally
[0433] (c) a transcription termination sequence.

[0434] Preferably, the nucleic acid encoding a ZPR polypeptide is as defined above. The term “control sequence” and “termination sequence” are as defined herein.

[0435] The invention furthermore provides plants transformed with a construct as described above. In particular, the invention provides plants transformed with a construct as described above, which plants have increased yield-related traits as described herein.

[0436] Plants are transformed with a vector comprising any of the nucleic acids described above. The skilled artisan is well aware of the genetic elements that must be present on the vector in order to successfully transform, select and propagate host cells containing the sequence of interest. The sequence of interest is operably linked to one or more control sequences (at least to a promoter).

[0437] Advantageously, any type of promoter, whether natural or synthetic, may be used to drive expression of the nucleic acid sequence, but preferably the promoter is of plant origin. A constitutive promoter is particularly useful in the methods. Preferably the constitutive promoter is a ubiquitous constitutive promoter of medium strength. See the “Definitions” section herein for definitions of the various promoter types.

[0438] It should be clear that the applicability of the present invention is not restricted to the ZPR polypeptide-encoding nucleic acid represented by SEQ ID NO: 746, nor is the applicability of the invention restricted to expression of a ZPR polypeptide-encoding nucleic acid when driven by a constitutive promoter.

[0439] In a preferred embodiment, the constitutive promoter is preferably a medium strength promoter. Preferably it is a plant derived promoter, more preferably it is a GOS2 promoter or a promoter of substantially the same strength and having substantially the same expression pattern (a functionally equivalent promoter). Even more preferably the promoter is the GOS2 promoter from rice. Further preferably the constitutive promoter is represented by a nucleic acid sequence substantially similar to SEQ ID NO: 928, most preferably the constitutive promoter is as represented by SEQ ID NO: 928. See the “Definitions” section herein for further examples of constitutive promoters.

[0440] Optionally, one or more terminator sequences may be used in the construct introduced into a plant. Preferably, the construct comprises an expression cassette comprising a GOS2 promoter, substantially similar to SEQ ID NO: 928, operably linked to the nucleic acid encoding the ZPR polypeptide. In on example, said expression cassette comprises the sequence that is at least 95% and for instance 96, 97, 98, 99 or 100% identical to the sequence represented by SEQ ID NO: 935 (pGOS2::ZPR::t-zein sequence). In another example, said expression cassette comprises a sequence that is at least 95% and for instance 96, 97, 98, 99 or 100% identical to the sequence represented by SEQ ID NO:937 (pGOS2::ZPR::terminator). Furthermore, one or more sequences encoding selectable markers may be present on the construct introduced into a plant.

[0441] According to a preferred feature of the invention, the modulated expression is increased expression. Methods for increasing expression of nucleic acids or genes, or gene products, are well documented in the art and examples are provided in the definitions section.

[0442] As mentioned above, a preferred method for modulating expression of a nucleic acid encoding a ZPR polypeptide is by introducing and expressing in a plant a nucleic acid encoding a ZPR polypeptide; however the effects of performing the method, i.e. enhancing yield-related traits may also be achieved using other well known techniques, including but not limited to T-DNA activation tagging, TILLING, homologous recombination. A description of these techniques is provided in the definitions section.

[0443] The invention also provides a method for the production of transgenic plants having enhanced yield-related traits as provided herein relative to control plants, comprising introduction and expression in a plant of any nucleic acid encoding a ZPR polypeptide as defined hereinabove.

[0444] More specifically, the present invention provides a method for the production of transgenic plants having enhanced yield-related traits relative to control plants, preferably increased yield relative to control plants, and more preferably increased seed yield relative to control plants, which method comprises:
[0445] (i) introducing and expressing in a plant or plant cell a ZPR polypeptide-encoding nucleic acid or a genetic construct comprising a ZPR polypeptide-encoding nucleic acid; and
[0446] (ii) cultivating the plant cell under conditions promoting plant growth and development.

[0447] Cultivating the plant cell under conditions promoting plant growth and development, may or may not include regeneration and or growth to maturity.

[0448] The nucleic acid of (i) may be any of the nucleic acids capable of encoding a ZPR polypeptide as defined herein.

[0449] The nucleic acid may be introduced directly into a plant cell or into the plant itself (including introduction into a tissue, organ or any other part of a plant). According to a preferred feature of the present invention, the nucleic acid is preferably introduced into a plant by transformation. The term “transformation” is described in more detail in the “definitions” section herein.

[0450] The present invention clearly extends to any plant cell or plant produced by any of the methods described herein, and to all plant parts and propagules thereof. The present invention encompasses plants or parts thereof (including seeds) obtainable by the methods according to the present invention. The plants or parts thereof comprise a nucleic acid transgene encoding a ZPR polypeptide as defined above. The present invention extends further to encompass the progeny of a primary transformed or transfected cell, tissue, organ or whole plant that has been produced by any of the aforementioned methods, the only requirement being that progeny exhibit the same genotypic and/or phenotypic characteristic(s) as those produced by the parent in the methods according to the invention.

[0451] The invention also includes host cells containing an isolated nucleic acid encoding a ZPR polypeptide as defined hereinabove. Preferred host cells according to the invention are plant cells. Host plants for the nucleic acids or the vector used in the method according to the invention, the expression cassette or construct or vector are, in principle, advantageously all plants, which are capable of synthesizing the polypeptides used in the inventive method.

[0452] The methods of the invention are advantageously applicable to any plant, in particular to any plant as defined herein. Plants that are particularly useful in the methods of the invention include all plants which belong to the superfamily Viridiplantae, in particular monocotyledonous and dicotyledonous plants including fodder or forage legumes, ornamental plants, food crops, trees or shrubs. Food crops may include for instance crop plants or cereals such as those provided herein.

[0453] According to an embodiment of the present invention, the plant is a crop plant. Examples of crop plants include but are not limited to chicory, carrot, cassava, trefoil, soybean, beet, sugar beet, sunflower, canola, alfalfa, rapeseed, linseed, cotton, tomato, potato and tobacco.

[0454] According to another embodiment of the present invention, the plant is a monocotyledonous plant. Examples of monocotyledonous plants include sugarcane.

[0455] According to another embodiment of the present invention, the plant is a cereal. Examples of cereals include rice, maize, wheat, barley, millet, rye, triticale, sorghum, emmer, spelt, secale, einkorn, teff, milo and oats.

[0456] The invention also extends to harvestable parts of a plant such as, but not limited to seeds, leaves, fruits, flowers, stems, roots, rhizomes, tubers and bulbs, which harvestable parts comprise a recombinant nucleic acid encoding a ZPR polypeptide. The invention furthermore relates to products derived, preferably directly derived, from a harvestable part of such a plant, such as dry pellets or powders, oil, fat and fatty acids, starch or proteins.

[0457] The present invention also encompasses use of nucleic acids encoding ZPRI polypeptides as described herein and use of these ZPR polypeptides in enhancing any of the aforementioned yield-related traits in plants. For example, nucleic acids encoding ZPR polypeptide described herein, or the ZPR polypeptides themselves, may find use in breeding programs in which a DNA marker is identified which may be genetically linked to a ZPR polypeptide-encoding gene. The nucleic acids/genes, or the ZPR polypeptides themselves may be used to define a molecular marker. This DNA or protein marker may then be used in breeding programs to select plants having enhanced yield-related traits as defined hereinabove in the methods of the invention. Furthermore, allelic variants of a ZPR polypeptide-encoding nucleic acid/gene may find use in marker-assisted breeding programs. Nucleic acids encoding ZPR polypeptides may also be used as probes for genetically and physically mapping the genes that they are a part of, and as markers for traits linked to those genes. Such information may be useful in plant breeding in order to develop lines with desired phenotypes.

### Items

[0458] The invention is further characterised by one or more of the following items:
[0459] 1. A method for enhancing yield-related traits in plants relative to control plants, comprising modulating expression in a plant of a nucleic acid encoding an OsRSZ33 RRM polypeptide, wherein said OsRSZ33 RRM polypeptide comprises from N- to C-terminus an RRM domain, two Zinc Knuckles.
[0460] 2. Method according to item 1, wherein said OsRSZ33 RRM polypeptide comprises one or more of the motifs 1 to 3 (SEQ ID NO: 241 to 246).
[0461] 3. Method according to item 1 or 2, wherein said modulated expression is effected by introducing and expressing in a plant a nucleic acid encoding an OsRSZ33 RRM polypeptide.
[0462] 4. Method according to any one of items 1 to 3, wherein said nucleic acid encoding an OsRSZ33 RRM polypeptide encodes any one of the proteins listed in Table A or is a portion of such a nucleic acid, or a nucleic acid capable of hybridising with such a nucleic acid.
[0463] 5. Method according to any one of items 1 to 4, wherein said nucleic acid sequence encodes an orthologue or paralogue of any of the proteins given in Table A.
[0464] 6. Method according to any preceding item, wherein said enhanced yield-related traits comprise increased yield and/or early vigour, relative to control plants.
[0465] 7. Method according to any one of items 1 to 6, wherein said enhanced yield-related traits are obtained under non-stress conditions.
[0466] 8. Method according to any one of items 3 to 7, wherein said nucleic acid is operably linked to a constitutive promoter, preferably to a GOS2 promoter, most preferably to a GOS2 promoter from rice.
[0467] 9. Method according to any one of items 1 to 8, wherein said nucleic acid encoding an OsRSZ33 RRM polypeptide is of plant origin, preferably from a dicotyledonous plant, further preferably from the family Poaceae, more preferably from the genus Oryza, most preferably from Oryza sativa.
[0468] 10. Plant or part thereof, including seeds, obtainable by a method according to any one of items 1 to 9, wherein said plant or part thereof comprises a recombinant nucleic acid encoding an OsRSZ33 RRM polypeptide.
[0469] 11. Construct comprising:
   [0470] (i) nucleic acid encoding an OsRSZ33 RRM polypeptide as defined in items 1 or 2;
   [0471] (ii) one or more control sequences capable of driving expression of the nucleic acid sequence of (a); and optionally
   [0472] (iii) a transcription termination sequence.
[0473] 12. Construct according to item 11, wherein one of said control sequences is a constitutive promoter, preferably a GOS2 promoter, most preferably a GOS2 promoter from rice.
[0474] 13. Use of a construct according to item 11 or 12 in a method for making plants having increased yield, particularly increased biomass and/or increased seed yield relative to control plants.
[0475] 14. Plant, plant part or plant cell transformed with a construct according to item 11 or 12.
[0476] 15. Method for the production of a transgenic plant having increased yield, particularly increased biomass and/or increased seed yield relative to control plants, comprising:
   [0477] (i) introducing and expressing in a plant a nucleic acid encoding an OsRSZ33 RRM polypeptide as defined in item 1 or 2; and
   [0478] (ii) cultivating the plant cell under conditions promoting plant growth and development.
[0479] 16. Transgenic plant having increased yield, particularly increased biomass and/or increased seed yield, relative to control plants, resulting from modulated expression of a nucleic acid encoding an OsRSZ33 RRM polypeptide as defined in item 1 or 2, or a transgenic plant cell derived from said transgenic plant.
[0480] 17. Transgenic plant according to item 10, 14 or 16, or a transgenic plant cell derived thereof, wherein said plant is a crop plant, such as beet or sugarbeet or alfalfa, or a monocot such as sugarcane, or a cereal, such as rice, maize, wheat, barley, millet, rye, triticale, sorghum emmer, spelt, secale, einkorn, teff, milo and oats.
[0481] 18. Harvestable parts of a plant according to item 17, wherein said harvestable parts are preferably shoot biomass and/or seeds.
[0482] 19. Products derived from a plant according to item 17 and/or from harvestable parts of a plant according to item 18.
[0483] 20. Use of a nucleic acid encoding an OsRSZ33 RRM polypeptide in increasing yield, particularly in increasing seed yield and/or shoot biomass in plants, relative to control plants.
[0484] 21. A method for enhancing yield-related traits in plants relative to control plants, comprising modulating expression in a plant of a nucleic acid encoding a growth-related protein (GRP) having at least 25% sequence identity to the amino acid sequence represented by SEQ ID NO: 251.
[0485] 22. Method according to item 21, wherein said modulated expression is effected by introducing and expressing said nucleic acid in a plant.
[0486] 23. Method according to item 21 or 22, wherein said enhanced yield-related trait comprises increased yield relative to control plants.
[0487] 24. Method according to item 23, wherein said increased yield comprises increased seed yield relative to control plants, and preferably said increased seed yield is selected from any one or more of:
   [0488] (i) increased harvest index;
   [0489] (ii) increased total seed weight;
   [0490] (iii) increased number of filled seeds; and
   [0491] (iv) increased thousand kernel weight.
[0492] 25. Method according to any of items 21 to 24, wherein said enhanced yield-related trait comprises increased biomass, and preferably increased aboveground biomass, relative to control plants.
[0493] 26. Method according to any one of items 21 to 25, wherein said enhanced yield-related traits are obtained under non-stress conditions.
[0494] 27. Method according to any one of items 21 to 25, wherein said enhanced yield-related traits are obtained under conditions of drought stress, salt stress or nitrogen deficiency.
[0495] 28. Method according to any of items 21 to 27, wherein said growth-related protein has a motif having at least 70% sequence identity to motif 7: [NHPS][SC][CR][RK]K[NK][VST][PD][GD][TAV][ST]F[VL][SE]DL[RK]DH[IM][HD]EFI[NH]AS[ASM]DEH[MRK][TH]C F[TK][KN]T[IL][KQ][KR]MF[GD]MS[KM][TAV]V[AT] (SEQ ID NO: 742).
[0496] 29. Method according to any one of items 21 to 28, wherein said nucleic acid encoding said polypeptide is of plant origin, preferably from a monocotyledonous plant, further preferably from the family Poaceae, more preferably from the genus Oryza, most preferably from Oryza sativa.
[0497] 30. Method according to any one of items 21 to 29, wherein said nucleic acid encodes any one of the polypeptides listed in Table F or is a portion of such a nucleic acid, or a nucleic acid capable of hybridising with such a nucleic acid.
[0498] 31. Method according to any one of items 21 to 30, wherein said nucleic acid encodes an orthologue or paralogue of any of the polypeptides given in Table F.
[0499] 32. Method according to any one of items 21 to 31, wherein said nucleic acid encodes the polypeptide as represented by SEQ ID NO: 251
[0500] 33. Method according to any one of items 21 to 32, wherein said nucleic acid is operably linked to a constitutive promoter, preferably to a medium strength constitutive promoter, preferably to a plant promoter, more preferably to a GOS2 promoter, most preferably to a GOS2 promoter from rice.
[0501] 34. Plant, plant part thereof, including seeds, or plant cell, obtainable by a method according to any one of items 21 to 33, wherein said plant, plant part or plant cell comprises a recombinant nucleic acid encoding a polypeptide as defined in any of items 21 and 28 to 32.
[0502] 35. Construct comprising:
   [0503] (i) a nucleic acid encoding a polypeptide as defined in any of items 21 and 28 to 32,
   [0504] (ii) one or more control sequences capable of driving expression of the nucleic acid sequence of (i); and optionally
   [0505] (iii) a transcription termination sequence.
[0506] 36. Construct according to item 35 wherein one of said control sequences is a constitutive promoter, preferably a medium strength constitutive promoter, preferably a plant promoter, more preferably a GOS2 promoter, most preferably a GOS2 promoter from rice.
[0507] 37. Use of a construct according to item 35 or 36 in a method for making plants having enhanced yield-related traits.
[0508] 38. Plant, plant part or plant cell transformed with a construct according to item 35 or 36.
[0509] 39. Method for the production of a transgenic plant having enhanced yield-related traits relative to control plants, comprising:
   [0510] (i) introducing and expressing in a plant cell or plant a nucleic acid encoding a polypeptide as defined in any of items 21 and 28 to 32; and
   [0511] (ii) cultivating said plant cell or plant under conditions promoting plant growth and development.
[0512] 40. Method according to item 39, wherein said enhanced yield-related traits are as defined in any of items 23 to 27.
[0513] 41. Transgenic plant having enhanced yield-related traits relative to control plants, preferably as defined in any of items 23 to 25 resulting from modulated expression of a nucleic acid encoding a polypeptide as defined in any of items 21 and 28 to 32 or a transgenic plant cell derived from said transgenic plant.
[0514] 42. Transgenic plant according to item 34, 38 or 41, or a transgenic plant cell derived therefrom, wherein said plant is a crop plant, such as beet, sugarbeet or alfalfa; or a monocotyledonous plant such as sugarcane; or a cereal, such as rice, maize, wheat, barley, millet, rye, triticale, sorghum, emmer, spelt, secale, einkorn, teff, milo or oats.
[0515] 43. Harvestable parts of a plant according to item 41 or 42 wherein said harvestable parts are preferably shoot biomass and/or seeds.
[0516] 44. Products derived from a plant according to item 41 or 42 and/or from harvestable parts of a plant according to item 43.
[0517] 45. Use of a nucleic acid encoding a polypeptide as defined in any of items 21 and 28 to 32 for enhancing yield-related traits in plants, and preferably wherein said yield-related traits are as defined in any of items 23 to 27, relative to control plants.
[0518] 46. An isolated nucleic acid selected from:
   [0519] (i) a nucleic acid represented by any one of SEQ ID NO: 266, 286, 316, 374, 376, 380, 424, 456, 458, 460, 462, 648, 650, 670, and 736;
   [0520] (ii) the complement of a nucleic acid represented by any one of SEQ ID NO: 266, 286, 316, 374, 376, 380, 424, 456, 458, 460, 462, 648, 650, 670, and 736;
   [0521] (iii) a nucleic acid encoding the polypeptide as represented by any one of SEQ ID NO: 267, 287, 317, 375, 377, 381, 425, 457, 459, 461, 463, 649, 651, 671 and 737, preferably as a result of the degeneracy of the genetic code, said isolated nucleic acid can be derived from a polypeptide sequence as represented by any one of SEQ ID NO: 267, 287, 317, 375, 377, 381, 425, 457, 459, 461, 463, 649, 651, 671 and 737 and further preferably confers enhanced yield-related traits relative to control plants;
   [0522] (iv) a nucleic acid having, in increasing order of preference at least 25%, 26%, 27%, 28%, 29%, 30%, 31%, 32%, 33%, 34%, 35%, 36%, 37%, 38%, 39%, 40%, 41%, 42%, 43%, 44%, 45%, 46%, 47%, 48%, 49%, 50%, 51%, 52%, 53%, 54%, 55%, 56%, 57%, 58%, 59%, 60%, 61%, 62%, 63%, 64%, 65%, 66%, 67%, 68%, 69%, 70%, 71%, 72%, 73%, 74%, 75%, 76%, 77%, 78%, 79%, 80%, 81%, 82%, 83%, 84%, 85%, 86%, 87%, 88%, 89%, 90%, 91%, 92%, 93%, 94%, 95%, 96%, 97%, 98%, or 99% sequence identity with any of the nucleic acid sequences represented by any one of SEQ ID NO: 266, 286, 316, 374, 376, 380, 424, 456, 458, 460, 462, 648, 650, 670, and 736; and any of the other nucleic acid sequences in Table F and further preferably conferring enhanced yield-related traits relative to control plants;
   [0523] (v) a nucleic acid molecule which hybridizes with a nucleic acid molecule of (i) to (iv) under stringent hybridization conditions and preferably confers enhanced yield-related traits relative to control plants;
   [0524] (vi) a nucleic acid encoding a polypeptide having, in increasing order of preference, at least 25%, 26%, 27%, 28%, 29%, 30%, 31%, 32%, 33%, 34%, 35%, 36%, 37%, 38%, 39%, 40%, 41%, 42%, 43%, 44%, 45%, 46%, 47%, 48%, 49%, 50%, 51%, 52%, 53%, 54%, 55%, 56%, 57%, 58%, 59%, 60%, 61%, 62%, 63%, 64%, 65%, 66%, 67%, 68%, 69%, 70%, 71%, 72%, 73%, 74%, 75%, 76%, 77%, 78%, 79%, 80%, 81%, 82%, 83%, 84%, 85%, 86%, 87%, 88%, 89%, 90%, 91%, 92%, 93%, 94%, 95%, 96%, 97%, 98%, or 99% sequence identity to the amino acid sequence represented by any one of SEQ ID NO: 267, 287, 317, 375, 377, 381, 425, 457, 549, 461, 463, 649, 651, 671 and 737 and any of the other amino acid sequences in Table F and preferably conferring enhanced yield-related traits relative to control plants.
[0525] 47. An isolated polypeptide selected from:
   [0526] (i) an amino acid sequence represented by any one of SEQ ID NO: 267, 287, 317, 375, 377, 381, 425, 457, 459, 461, 463, 649, 651, 671 and 737;
   [0527] (ii) an amino acid sequence having, in increasing order of preference, at least 25%, 26%, 27%, 28%, 29%, 30%, 31%, 32%, 33%, 34%, 35%, 36%, 37%, 38%, 39%, 40%, 41%, 42%, 43%, 44%, 45%, 46%, 47%, 48%, 49%, 50%, 51%, 52%, 53%, 54%, 55%, 56%, 57%, 58%, 59%, 60%, 61%, 62%, 63%, 64%, 65%, 66%, 67%, 68%, 69%, 70%, 71%, 72%, 73%, 74%, 75%, 76%, 77%, 78%, 79%, 80%, 81%, 82%, 83%, 84%, 85%, 86%, 87%, 88%, 89%, 90%, 91%, 92%, 93%, 94%, 95%, 96%, 97%, 98%, or 99% sequence identity to the amino acid sequence represented by any one of SEQ ID NO: 267, 287, 317, 375, 377, 381, 425, 457, 459, 461, 463, 649, 651, 671 and 737, and any of the other amino acid sequences in Table F and preferably conferring enhanced yield-related traits relative to control plants, and
   [0528] (iii) derivatives of any of the amino acid sequences given in (i) or (ii) above.
[0529] 48. Use of an isolated nucleic acid according to item 46, or of an isolated polypeptide according to item 47 for enhancing yield-related traits in plants, and preferably wherein said yield-related traits are as defined in any of items 23 to 27, relative to control plants.
[0530] 49. A method for enhancing yield-related traits in plants relative to control plants, comprising modulating expression in a plant of a nucleic acid encoding a ZPR polypeptide, wherein said ZPR polypeptide comprises a Leucine Zipper (ZIP) domain that is six heptads in length.
[0531] 50. Method according item 49, wherein said ZPR polypeptide comprises one or more of the following motifs:

(i)
(SEQ ID NO: 929)
Motif 8: II[EK]ENE[KR]LR[KE][KR]A[LS][LA]L[HR][QR]
EN,
(ii)
(SEQ ID NO: 930)
Motif 9: [EI]M[EK][MI]KNLKLY[EML]EN[KQ][SCI],
(iii)
(SEQ ID NO: 931)
Motif 10: [QKL][AD]L[LF][ST][QE][LI][QI][KQ][KQ]
[LI]SxPx

[0532] 51. Method according to item 49 or 50, wherein said Leucine Zipper domain is located in the central to C-terminal region of said ZPR polypeptide.
[0533] 52. Method according to any of items 49 to 51, wherein said ZPR polypeptide further comprises one or more of the following motifs:

(i)
(SEQ ID NO: 932)
Motif 11: K[VL][KA]K[EI]M[EK]MKNLKLY[MEL]EN[QKR]
[SIC]I[IL]EENE[KR]LR[KE][KRQ]A[LS][LA]L[HR][QR]EN
[LKQ][AD]L[LF][STQ][QI][LI][QI][KQN][KQ][IF]S,
(ii)
(SEQ ID NO: 933)
Motif 12: MC[HS][AG][SI]Sx[HS][LS][ES]S,
(iii)
(SEQ ID NO: 934)
Motif 13: [VI][HS][RV]L[NK][LR]RR

[0534] 53. Method according to any one of items 49 to 52, wherein said nucleic acid encoding a ZPR polypeptide is of plant origin, and preferably from a dicotyledonous plant.
[0535] 54. Method according to any one of items 49 to 53, wherein said nucleic acid encoding a ZPR polypeptide is from the family Solanaceae, more preferably from the genus Solanum, most preferably from Solanum lycopersicum.
[0536] 55. Method according to any one of items 49 to 54, wherein said nucleic acid encoding a ZPR polypeptide encodes any one of the polypeptides listed in Table J or is a portion of such a nucleic acid, or a nucleic acid capable of hybridising with such a nucleic acid.
[0537] 56. Method according to any one of items 49 to 55, wherein said nucleic acid sequence encoding a ZPR polypeptide encodes an orthologue or paralogue of any of the polypeptides given in Table J.
[0538] 57. Method according to any one of items 49 to 56, wherein said nucleic acid encodes the polypeptide represented by SEQ ID NO: 747 or a homologue thereof.
[0539] 58. Method according to any of items 49 to 57, wherein said modulated expression is effected by introducing and expressing in a plant said nucleic acid encoding said ZPR polypeptide.
[0540] 59. Method according to any one of items 49 to 58, wherein said enhanced yield-related traits comprise increased yield relative to control plants, and preferably increased seed yield relative to control plants.
[0541] 60. Method according to any one of items 49 to 59, wherein said enhanced yield-related traits are obtained under non-stress conditions.
[0542] 61. Method according to any one of items 49 to 59, wherein said enhanced yield-related traits are obtained under conditions of drought stress, salt stress or nitrogen deficiency.
[0543] 62. Method according to any one of items 49 to 61, wherein said nucleic acid is operably linked to a constitutive promoter, preferably to a medium strength constitutive promoter, preferably to a plant promoter, more preferably to a GOS2 promoter, most preferably to a GOS2 promoter from rice.
[0544] 63. Plant, plant part thereof, including seeds, or plant cell, obtainable by a method according to any one of items 49 to 62, wherein said plant, plant part or plant cell comprises a recombinant nucleic acid encoding a ZPR polypeptide as defined in any of items 49 to 57.
[0545] 64. Construct comprising:
   [0546] (i) nucleic acid encoding a ZPR as defined in any of items 49 to 57;
   [0547] (ii) one or more control sequences capable of driving expression of the nucleic acid sequence of (i); and optionally
   [0548] (iii) a transcription termination sequence.
[0549] 65. Construct according to item 64, wherein one of said control sequences is a constitutive promoter, preferably a medium strength constitutive promoter, more preferably a plant promoter
[0550] 66. Construct according to item 64 or 65, wherein one of said control sequences is a GOS2 promoter, preferably a GOS2 promoter from rice.
[0551] 67. Use of a construct according to any of items 64 to 66 in a method for making plants having enhanced yield-related traits, preferably increased yield relative to control plants, and more preferably increased seed yield relative to control plants.
[0552] 68. Plant, plant part or plant cell transformed with a construct according to any of items 64 to 66.
[0553] 69. Method for the production of a transgenic plant having enhanced yield-related traits relative to control plants, preferably increased yield relative to control plants, and more preferably increased seed yield relative to control plants, comprising:
   [0554] (i) introducing and expressing in a plant cell or plant a nucleic acid encoding a ZPR polypeptide as defined in any of items 49 to 57; or a genetic construct comprising a ZPR polypeptide-encoding nucleic acid as defined in any of items 64 to 66; and
   [0555] (ii) cultivating the plant cell under conditions promoting plant growth and development.
[0556] 70. Transgenic plant having enhanced yield-related traits relative to control plants, preferably increased yield relative to control plants, and more preferably increased seed yield relative to control plants, resulting from modulated expression of a nucleic acid encoding a ZPR polypeptide as defined in any of items 49 to 57 or a transgenic plant cell derived from said transgenic plant.
[0557] 71. Transgenic plant according to item 63, 68 or 70, or a transgenic plant cell derived therefrom, wherein said plant is a crop plant, such as beet, sugarbeet or alfalfa; or a monocotyledonous plant such as sugarcane; or a cereal, such as rice, maize, wheat, barley, millet, rye, triticale, sorghum, emmer, spelt, secale, einkorn, teff, milo or oats.
[0558] 72. Harvestable parts of a plant according to any of items 63, 68, 70 and 71, wherein said harvestable parts are seeds.
[0559] 73. Products derived from a plant according to any of items 63, 68, 70 and 71, and/or from harvestable parts of a plant according to item 72.
[0560] 74. An isolated nucleic molecule selected from:
   [0561] (i) a nucleic acid represented by any one of SEQ ID NO: 748, 790, 792, 862, 864, 870, 878, 902, 912, and 918;
   [0562] (ii) the complement of a nucleic acid represented by any one of SEQ ID NO: 748, 790, 792, 862, 864, 870, 878, 902, 912, and 918;
   [0563] (iii) a nucleic acid encoding a ZPR polypeptide having in increasing order of preference at least 50%, 51%, 52%, 53%, 54%, 55%, 56%, 57%, 58%, 59%, 60%, 61%, 62%, 63%, 64%, 65%, 66%, 67%, 68%, 69%, 70%, 71%, 72%, 73%, 74%, 75%, 76%, 77%, 78%, 79%, 80%, 81%, 82%, 83%, 84%, 85%, 86%, 87%, 88%, 89%, 90%, 91%, 92%, 93%, 94%, 95%, 96%, 97%, 98%, or 99% sequence identity to the amino acid sequence represented any one of SEQ ID NO: 749, 791, 793, 863, 865, and 871; and additionally or alternatively comprising one or more motifs having in increasing order of preference at least 50%, 55%, 60%, 65%, 70%, 75%, 80%, 85%, 90%, 95%, 96%, 97%, 98%, 99% or more sequence identity to any one or more of the motifs 1 to 6 as given in SEQ ID NO: 929 to SEQ ID NO: 934, and further preferably conferring enhanced yield-related traits relative to control plants;
   [0564] (iv) a nucleic acid encoding a ZPR polypeptide having in increasing order of preference at least 50%, 51%, 52%, 53%, 54%, 55%, 56%, 57%, 58%, 59%, 60%, 61%, 62%, 63%, 64%, 65%, 66%, 67%, 68%, 69%, 70%, 71%, 72%, 73%, 74%, 75%, 76%, 77%, 78%, 79%, 80%, 81%, 82%, 83%, 84%, 85%, 86%, 87%, 88%, 89%, 90%, 91%, 92%, 93%, 94%, 95%, 96%, 97%, 98%, or 99% sequence identity to the amino acid sequence represented any one of SEQ ID NO: 878, 902, 912, and 918; and additionally or alternatively comprising one or more motifs having in increasing order of preference at least 50%, 55%, 60%, 65%, 70%, 75%, 80%, 85%, 90%, 95%, 96%, 97%, 98%, 99% or more sequence identity to any one or more of the motifs 8 to 10 as given in SEQ ID NO: 929 to SEQ ID NO: 931, and further preferably conferring enhanced yield-related traits relative to control plants.
   [0565] (v) a nucleic acid molecule which hybridizes with a nucleic acid molecule of (i) to (iv) under high stringency hybridization conditions and preferably confers enhanced yield-related traits relative to control plants.
[0566] 75. An isolated polypeptide selected from:
   [0567] (i) an amino acid sequence represented by any one of SEQ ID NO: 749, 791, 793, 863, 865, 871, 879, 903, 913, and 919;
   [0568] (ii) an amino acid sequence having, in increasing order of preference, at least 25%, 26%, 27%, 28%, 29%, 30%, 31%, 32%, 33%, 34%, 35%, 36%, 37%, 38%, 39%, 40%, 41%, 42%, 43%, 44%, 45%, 46%, 47%, 48%, 49%, 50%, 51%, 52%, 53%, 54%, 55%, 56%, 57%, 58%, 59%, 60%, 61%, 62%, 63%, 64%, 65%, 66%, 67%, 68%, 69%, 70%, 71%, 72%, 73%, 74%, 75%, 76%, 77%, 78%, 79%, 80%, 81%, 82%, 83%, 84%, 85%, 86%, 87%, 88%, 89%, 90%, 91%, 92%, 93%, 94%, 95%, 96%, 97%, 98%, or 99% sequence identity to the amino acid sequence represented by SEQ ID NO: 749, 791, 793, 863, 865, and 871; and additionally or alternatively comprising one or more motifs having in increasing order of preference at least 50%, 55%, 60%, 65%, 70%, 75%, 80%, 85%, 90%, 95%, 96%, 97%, 98%, 99% or more sequence identity to any one or more of the motifs 8 to 13 given in SEQ ID NO: 929 to SEQ ID NO: 934, and further preferably conferring enhanced yield-related traits relative to control plants;
   [0569] (iii) an amino acid sequence having, in increasing order of preference, at least 25%, 26%, 27%, 28%, 29%, 30%, 31%, 32%, 33%, 34%, 35%, 36%, 37%, 38%, 39%, 40%, 41%, 42%, 43%, 44%, 45%, 46%, 47%, 48%, 49%, 50%, 51%, 52%, 53%, 54%, 55%, 56%, 57%, 58%, 59%, 60%, 61%, 62%, 63%, 64%, 65%, 66%, 67%, 68%, 69%, 70%, 71%, 72%, 73%, 74%, 75%, 76%, 77%, 78%, 79%, 80%, 81%, 82%, 83%, 84%, 85%, 86%, 87%, 88%, 89%, 90%, 91%, 92%, 93%, 94%, 95%, 96%, 97%, 98%, or 99% sequence identity to the amino acid sequence represented by SEQ ID NO: 879, 903, 913, and 919; and additionally or alternatively comprising one or more motifs having in increasing order of preference at least 50%, 55%, 60%, 65%, 70%, 75%, 80%, 85%, 90%, 95%, 96%, 97%, 98%, 99% or more sequence identity to any one or more of the motifs 8 to 10 given in SEQ ID NO: 929 to SEQ ID NO: 931, and further preferably conferring enhanced yield-related traits relative to control plants;
   [0570] (iv) derivatives of any of the amino acid sequences given in (i) to (iii) above.
[0571] 76. Use of a nucleic acid as defined in any of items 49 to 57 and 74 or of a nucleic acid encoding a ZPR polypeptide as defined in any of items 49 to 57 and 75 for enhancing yield-related traits in plants relative to control plants, preferably for increasing yield in plants relative to control plants, and more preferably for increasing seed yield in plants relative to control plants.

### DESCRIPTION OF FIGURES

[0572] The present invention will now be described with reference to the following figures in which:

[0573] FIG. 1 A represents a graphical overview of an OsRSZ33 RRM protein (Isshiki et al., 2006);

[0574] FIG. 1 B represents the domain structure of SEQ ID NO: 2 with the RRM domain in bold and the two Zinc knuckle domains in italics. The conserved motifs 1 to 3 are underlined and numbered. The position of the signature sequences are indicated by a dashed line.

[0575] FIG. 2 represents a multiple alignment of various OsRSZ33 RRM polypeptides. The asterisks indicate identical amino acids among the various protein sequences, colons represent highly conserved amino acid substitutions, and the dots represent less conserved amino acid substitution; on other positions there is no sequence conservation. These alignments can be used for defining further motifs, when using conserved amino acids. T.aestivum_TC300145: SEQ ID NO: 216; Triae_RSZ38: SEQ ID NO: 224; H.vulgare_{—}@6248: SEQ ID NO: 222; T.aestivum_TC286992: SEQ ID NO: 34; T.turgidum_AJ612509: SEQ ID NO: 28; O.sativa_LOC_Os03g17710.1: SEQ ID NO: 230; O.sativa_LOC_Os03g17710.2: SEQ ID NO: 204; O.glaberrima_Og014036: SEQ ID NO: 202; O.sativa_LOC_Os05g02880: SEQ ID NO: 2; Z.mays_{—}@11244: SEQ ID NO: 226; Z.mays_TC490304: SEQ ID NO: 228; Z.mays_{—}@13012: SEQ ID NO: 212; S.bicolor_Sb09g001910: SEQ ID NO: 234; Z.mays_TC510523: SEQ ID NO: 236; Z.mays_{—}@35142: SEQ ID NO: 238; S.officinarum_TC76505: SEQ ID NO: 210; S.officinarum_TC80184: SEQ ID NO: 240; S.officinarum_CA282538: SEQ ID NO: 4; P.virgatum_TC27619: SEQ ID NO: 206; S.bicolor_Sb09g001920: SEQ ID NO: 172; S.officinarum_TC107276: SEQ ID NO: 174; Z.mays_{—}@11445: SEQ ID NO: 198; Z.mays_TC527608: SEQ ID NO: 200; Z.mays_TC518048: SEQ ID NO: 184; P.virgatum_TC32128: SEQ ID NO: 182; S.hybrid_CF570698: SEQ ID NO: 12; S.officinarum_TC86028: SEQ ID NO: 76; S.officinarum_CA177377: SEQ ID NO: 46; and P.virgatum_TC2491: SEQ ID NO: 10.

[0576] FIG. 3 shows phylogenetic tree of OsRSZ33 RRM polypeptides and other SR proteins (Isshiki et al., 2006, supplemental FIG. 2).

[0577] The amino acid sequences of rice, Arabidopsis, and human SR proteins are aligned with ClustalW software. The accession numbers of the SR proteins shown are as follows: At SRp34/SR1, O22315; At SRp30, NP_{—}172386; At SRp34a, NP_{—}567235; At SRp34b, NP_{—}190512; At RSp31, P92964; At RSp40, P92965; At RSp41, P92966; At RSZp21, NP_{—}973901; At RSZp22, NP_{—}194886; At RSZp22a, NP_{—}180035; At RSZ32, NP_{—}190918 At RSZ33, NP_{—}973620; At SC35, NP_{—}201225; At SCL33, NP_{—}564685; At SCL30, NP_{—}567021; At SCL30a, NP_{—}187966; At SCL28, NP_{—}197382; Hs ASF/SF2, Q07955; Hs SC35, Q01130 and Hs 9G8, Q16629.

[0578] FIG. 4 represents the binary vector used for increased expression in Oryza sativa of an OsRSZ33 RRM-encoding nucleic acid under the control of a rice GOS2 promoter (pGOS2)

[0579] FIG. 5 details the domain consensus sequence for SM00360 and SM00340 as given in SMART. Under “SM00360,” PT54_YEAST: SEQ ID NO: 938; CONSENSUS/80%: SEQ ID NO: 939; CONSENSUS/65%: SEQ ID NO: 940; and CONSENSUS/50%: SEQ ID NO: 941; under “SM00343,” 63|O46363/12-173: SEQ ID NO: 942; CONSENSUS/80%: SEQ ID NO: 943; CONSENSUS/65%: SEQ ID NO: 944; and CONSENSUS/50%: SEQ ID NO: 945.

[0580] FIG. 6 represents SEQ ID NO: 251 with indication of motif 7 (underlined).

[0581] FIG. 7 represents a multiple alignment of a representative list of growth-related polypeptides according to the invention. The asterisks indicate identical amino acids among the various protein sequences, colons represent highly conserved amino acid substitutions, and the dots represent less conserved amino acid substitution; on other positions there is no sequence conservation. These alignments can be used for defining further motifs, when using conserved amino acids. B.napus_TC90230: SEQ ID NO: 295; B.napus_TC97660: SEQ ID NO: 299; A.thaliana_AT3G05570.1: SEQ ID NO: 277; B.napus_TC83237: SEQ ID NO: 291; B.napus_TC89650: SEQ ID NO: 293; A.thaliana_AT4G39235: SEQ ID NO: 279; G.max_Glyma06g46580.1: SEQ ID NO: 401; M.truncatula_AC135566_{—}19.5: SEQ ID NO: 487; P.trichocarpa_{—}643359: SEQ ID NO: 567; P.trichocarpa_{—}831254: SEQ ID NO: 569; S.lycopersicum_TC200119: SEQ ID NO: 629; S.tuberosum_TC181351: SEQ ID NO: 643; L.usitatissimum_LU04MC10588_{—}62: SEQ ID NO: 463; S.lycopersicum_DB694810: SEQ ID NO: 627; T.aestivum_CA603660: SEQ ID NO: 645; T.aestivum_CK151611: SEQ ID NO: 647; T.aestivum_TC300853: SEQ ID NO: 655; T.aestivum_TC311647: SEQ ID NO: 663; T.aestivum_TC307541: SEQ ID NO: 659; H.vulgare_TC173149: SEQ ID NO: 429; T.aestivum_TA06MC03363_{—}5449537: SEQ ID NO: 649; H.vulgare_TC157023: SEQ ID NO: 427; T.aestivum_TC307720: SEQ ID NO: 661; S.bicolor_Sb01g009660.1: SEQ ID NO: 617; Z.mays_TC535140: SEQ ID NO: 735; Z.mays_TC477409: SEQ ID NO: 715; Z.mays_TC487740: SEQ ID NO: 721; O.sativa_LOC_Os03g51459.1: SEQ ID NO: 251; O.sativa_LOC_Os08g10400.1: SEQ ID NO: 513; H.vulgare_AJ473991: SEQ ID NO: 423; T.aestivum_TC313329: SEQ ID NO: 665; S.bicolor_Sb01g035820.1: SEQ ID NO: 621; S.officinarum_CA142694: SEQ ID NO: 633; Z.mays_TC490320: SEQ ID NO: 723; Z.mays_TC522093: SEQ ID NO: 731; Z.mays_TC522166: SEQ ID NO: 733; S.bicolor_Sb01g029160.1: SEQ ID NO: 619; Z.mays_TC486459: SEQ ID NO: 719; Z.mays_TC502630: SEQ ID NO: 725; and O.sativa_LOC_Os10g40824.1: SEQ ID NO: 515.

[0582] FIG. 8 shows the MATGAT table for a representative list of growth-related polypeptides according to the invention (Example 14)

[0583] FIG. 9 represents the binary vector used for increased expression in Oryza sativa of a nucleic acid encoding a polypeptide according to the invention under the control of a rice GOS2 promoter (pGOS2).

[0584] FIG. 10 corresponds to FIG. 12(A) provided in Wenkel et al. (2007) and shows the placement of the leucine zipper domain (grey zone) in each of the four Arabidopsis ZPR proteins.

[0585] FIG. 11 corresponds to FIG. 12(D) provided in Wenkel et al. (2007) and shows a phylogenetic tree of all four Arabidopsis, five rice, and two maize ZPR proteins. Alignment of the ZPR proteins was performed using the ClustalW algorithm. Bayesian phylogenetic analysis was conducted on the aligned protein data set using MrBayes version 3.1.2 (Huelsenbeck and Ronquist, 2001 Bioinformatics 17: 754-755.). Default settings were used, and the program was allowed to run for 100,000 generations. Trees were summarized after discarding the first 25,000 generations. The number above each branch corresponds to the posterior probability for that node.

[0586] FIG. 12 represents the domain structure of SEQ ID NO: 747 with conserved motifs 8 to 13 and with indication of the Leucine Zipper domain.

[0587] FIG. 13 represents a multiple alignment of a representative number of ZPR polypeptides. In particular, the represented ZPR polypeptides are characterized in that the Leucine Zipper domain is located in the central to C-terminal region of said ZPR polypeptide. The ZPR polypeptide represented by SEQ ID NO:747 is indicated with a box. The Leucine Zipper domain is located between the amino acids at position 59 and 100 in this protein and is indicated with a box. The six different heptads are separated with black dotted lines. These alignments can be used for defining further motifs, when using conserved amino acids. A.hypogaea_EG373732: SEQ ID NO: 751; G.max_Glyma09g40450.1: SEQ ID NO: 789; G.max_TC286014: SEQ ID NO: 797; G.max_GM06MC39606_{—}50673886@38431: SEQ ID NO: 791; G.max_TC305219: SEQ ID NO: 799; G.max_GM06MSsu40h07.r_{—}46819511@70598: SEQ ID NO: 793; G.max_Glyma01g34620.1: SEQ ID NO: 787; G.max_TC281725: SEQ ID NO: 795; P.vulgaris_FE900059: SEQ ID NO: 831; A.lyrata_{—}322199: SEQ ID NO: 753; A.thaliana_AT2G45450.1: SEQ ID NO: 757; B.napus_CD822359: SEQ ID NO: 763; A.lyrata_{—}899056: SEQ ID NO: 755; A.thaliana_AT3G60890.1: SEQ ID NO: 759; A.trichopoda_CK765457: SEQ ID NO: 761; P.abies_AM172974: SEQ ID NO: 819; P.sitchensis_TA14065_{—}3332: SEQ ID NO: 823; T.cryptomerioides_DN975845: SEQ ID NO: 853; E.tef_DN482990: SEQ ID NO: 775; S.bicolor_Sb02g030180.1: SEQ ID NO: 835; S.propinquum_TA5427_{—}132711: SEQ ID NO: 843; S.hybrid_CF573336: SEQ ID NO: 837; S.hybrid_CF575621: SEQ ID NO: 839; Z.mays_BG842570: SEQ ID NO: 861; Z.mays_TC477977: SEQ ID NO: 867; Z.mays_TC529546: SEQ ID NO: 869; Z.mays_c62174110gm030403@15401: SEQ ID NO: 863; Z.mays_ZM07MC28025_BFb0123H02@27941: SEQ ID NO: 871; Zeama_ZmPC0129214_ZPRB: SEQ ID NO: 873; Z.mays_c62219732gm030403@9841: SEQ ID NO: 865; O.sativa_LOC_Os09g34890.1: SEQ ID NO: 815; Os_ZPRa_Os09g0520500: SEQ ID NO: 817; C.annuum_TC13916: SEQ ID NO: 765; S.lycopersicum_TC205388: SEQ ID NO: 747; S.tuberosum_TC176950: SEQ ID NO: 847; N.tabacum_TC60414: SEQ ID NO: 813; C.intybus_EH709619: SEQ ID NO: 767; L.perennis_TA2167_{—}43195: SEQ ID NO: 801; C.tinctorius_EL400918: SEQ ID NO: 773; C.melo_EB715099: SEQ ID NO: 769; V.vinifera_GSVIVT00026366001: SEQ ID NO: 859; G.hirsutum_DW518216: SEQ ID NO: 781; G.hirsutum_TC163217: SEQ ID NO: 783; T.cacao_CU522069: SEQ ID NO: 849; P.deltoides_TA3399_{—}3696: SEQ ID NO: 821; P.trichocarpa_{—}554264: SEQ ID NO: 827; V.vinifera_GSVIVT00001026001: SEQ ID NO: 857; S.lycopersicum_TC207895: SEQ ID NO: 841; S.tuberosum_EG011112: SEQ ID NO: 845; Triphysaria_sp_TC4136: SEQ ID NO: 855; G.hybrid_AJ765000: SEQ ID NO: 785; L.sativa_TC25720: SEQ ID NO: 803; L.virosa_DW156764: SEQ ID NO: 809; L.serriola_DW114794: SEQ ID NO: 805; L.serriola_DW122307: SEQ ID NO: 807; C.sinensis_TC13047: SEQ ID NO: 771; E.tirucalli_BP956571: SEQ ID NO: 777; P.tremula_TA8085_{—}113636: SEQ ID NO: 825; P.trichocarpa_{—}823907: SEQ ID NO: 829; Pt_ZPR_small_Lzipper: SEQ ID NO: 749; G.hirsutum_DW501389: SEQ ID NO: 779; T.cacao_TC3649: SEQ ID NO: 851; M.domestica_TC51427: SEQ ID NO: 811; R.chinensis_BI978399: SEQ ID NO: 833; and Consensus: SEQ ID NO: 946.

[0588] FIG. 14 shows the MATGAT table of Example 23 for a representative number of ZPR polypeptides. The represented ZPR polypeptides are indicated by the following numbering: 1. S.lycopersicum_TC205388, 2. A.hypogaea_EG373732, 3. A.lyrata_{—}322199, 4. A.Iyrata_{—}899056, 5. A.thaliana_AT2G45450.1, 6. A.thaliana_AT3G60890.1, 7. A.trichopoda_CK765457, 8. B.napus_CD822359, 9. C.annuum_TC13916, 10. C.intybus_EH709619, 11. C.melo_EB715099, 12. C.sinensis_TC13047, 13. C.tinctorius_EL400918, 14. E.tef_DN482990, 15. E.tirucalli_BP956571, 16. G.hirsutum_DW501389, 17. G.hirsutum_DW518216, 18. G.hirsutum_TC163217, 19. G.hybrid_AJ765000, 20. G.max_Glyma01g34620.1, 21. G.max_Glyma09g40450.1, 22. G.max_GM06MC39606_{—}50673886@38431, 23. G.max_GM06MSsu40h07.r_{—}46819511@70598, 24. G.max_TC281725, 25. G.max_TC286014, 26. G.max_TC305219, 27. L.perennis_TA2167_{—}43195, 28. L.sativa_TC25720, 29. L.serriola_DW114794, 30. L.serriola_DW122307, 31. L.virosa_DW156764, 32. M.domestica_TC51427, 33. N.tabacum_TC60414, 34. O.sativa_LOC_Os09g34890.1, 35. Os_ZPRa_Os09g0520500, 36. P.abies_AM172974, 37. P.deltoides_TA3399_{—}3696, 38. P.sitchensis_TA14065_{—}3332, 39. P.tremula_TA8085_{—}113636, 40. P.trichocarpa_{—}554264, 41. P.trichocarpa_{—}823907, 42. P.vulgaris_FE900059, 43. Pt_ZPR_small_Lzipper, 44. R.chinensis_BI978399, 45. S.bicolor_Sb02g030180.1, 46. S.hybrid_CF573336, 47. S.hybrid_CF575621, 48. S.lycopersicum_TC207895, 49. S.propinquum_TA5427_{—}132711, 50. S.tuberosum_EG011112, 51. S.tuberosum_TC176950, 52. T.cacao_CU522069, 53. T.cacao_TC3649, 54. T.cryptomerioides_DN975845, 55. Triphysaria_sp_TC4136, 56. V.vinifera_GSVIVT00001026001, 57. V.vinifera_GSVIVT00026366001, 58. Z.mays_BG842570, 59. Z.mays_c62174110gm030403@15401, 60. Z.mays_c62219732gm030403@9841, 61. Z.mays_TC477977, 62. Z.mays_TC529546, 63. Z.mays_ZM07MC28025_BFb0123H02@27941, 64. Zeama_ZmPC0129214_ZPRB

[0589] FIG. 15 represents the binary vector used for increased expression in Oryza sativa of a ZPR-encoding nucleic acid under the control of a rice GOS2 promoter (pGOS2).

### EXAMPLES

[0590] The present invention will now be described with reference to the following examples, which are by way of illustration alone. The following examples are not intended to completely define or otherwise limit the scope of the invention.

[0591] DNA manipulation: unless otherwise stated, recombinant DNA techniques are performed according to standard protocols described in (Sambrook (2001) Molecular Cloning: a laboratory manual, 3rd Edition Cold Spring Harbor Laboratory Press, CSH, New York) or in Volumes 1 and 2 of Ausubel et al. (1994), Current Protocols in Molecular Biology, Current Protocols. Standard materials and methods for plant molecular work are described in Plant Molecular Biology Labfax (1993) by R. D. D. Croy, published by BIOS Scientific Publications Ltd (UK) and Blackwell Scientific Publications (UK).

### Example 1

### Identification of Sequences Related to SEQ ID NO: 1 and SEQ ID NO: 2

[0592] Sequences (full length cDNA, ESTs or genomic) related to SEQ ID NO: 1 and SEQ ID NO: 2 were identified amongst those maintained in the Entrez Nucleotides database at the National Center for Biotechnology Information (NCBI) using database sequence search tools, such as the Basic Local Alignment Tool (BLAST) (Altschul et al. (1990) J. Mol. Biol. 215:403-410; and Altschul et al. (1997) Nucleic Acids Res. 25:3389-3402). The program is used to find regions of local similarity between sequences by comparing nucleic acid or polypeptide sequences to sequence databases and by calculating the statistical significance of matches. For example, the polypeptide encoded by the nucleic acid of SEQ ID NO: 1 was used for the TBLASTN algorithm, with default settings and the filter to ignore low complexity sequences set off. The output of the analysis was viewed by pairwise comparison, and ranked according to the probability score (E-value), where the score reflect the probability that a particular alignment occurs by chance (the lower the E-value, the more significant the hit). In addition to E-values, comparisons were also scored by percentage identity. Percentage identity refers to the number of identical nucleotides (or amino acids) between the two compared nucleic acid (or polypeptide) sequences over a particular length. In some instances, the default parameters may be adjusted to modify the stringency of the search. For example the E-value may be increased to show less stringent matches. This way, short nearly exact matches may be identified.

[0593] Table A provides a list of nucleic acid sequences related to SEQ ID NO: 1 and SEQ ID NO: 2.

TABLE A
Examples of OsRSZ33 RRM nucleic acids and polypeptides:

| | Nucleic | Poly- |
|---|---|---|
| | acid | peptide |
| | SEQ ID | SEQ ID |
| Name | NO: | NO: |
| O.sativa_LOC_Os05g02880.1#1 | 1 | 2 |
| S.officinarum_CA282538#1 | 3 | 4 |
| T.aestivum_TC361049#1 | 5 | 6 |
| G.hirsutum_ES798395#1 | 7 | 8 |
| P.virgatum_TC2491#1 | 9 | 10 |
| S.hybrid_CF570698#1 | 11 | 12 |
| G.max_Glyma19g35980.2#1 | 13 | 14 |
| G.max_Glyma19g35980.3#1 | 15 | 16 |
| P.trichocarpa_653760#1 | 17 | 18 |
| G.soja_BF598591#1 | 19 | 20 |
| N.tabacum_TC66751#1 | 21 | 22 |
| A.cepa_TC5720#1 | 23 | 24 |
| P.patens_TC43147#1 | 25 | 26 |
| T.turgidum_AJ612509#1 | 27 | 28 |
| B.rapa_DY010361#1 | 29 | 30 |
| O.sativa_LOC_Os01g06290.4#1 | 31 | 32 |
| T.aestivum_TC286992#1 | 33 | 34 |
| T.aestivum_TC350935#1 | 35 | 36 |
| H.annuus_TC43928#1 | 37 | 38 |
| P.persica_TC9991#1 | 39 | 40 |
| E.esula_TC6405#1 | 41 | 42 |
| B.napus_TC102852#1 | 43 | 44 |
| S.officinarum_CA177377#1 | 45 | 46 |
| S.tuberosum_TC163945#1 | 47 | 48 |
| L.sativa_DY982195#1 | 49 | 50 |
| C.sinensis_TC6225#1 | 51 | 52 |
| G.hirsutum_TC144987#1 | 53 | 54 |
| L.sativa_TC21129#1 | 55 | 56 |
| G.max_Glyma19g35980.4#1 | 57 | 58 |
| P.virgatum_TC49604#1 | 59 | 60 |
| B.napus_TC90802#1 | 61 | 62 |
| B.napus_TC87766#1 | 63 | 64 |
| C.clementina_TC16391#1 | 65 | 66 |
| N.tabacum_TC43449#1 | 67 | 68 |
| T.aestivum_TC316707#1 | 69 | 70 |
| N.benthamiana_TC15005#1 | 71 | 72 |
| H.vulgare_TC162354#1 | 73 | 74 |
| S.officinarum_TC86028#1 | 75 | 76 |
| T.aestivum_TC316886#1 | 77 | 78 |
| B.napus_TC84291#1 | 79 | 80 |
| A.lyrata_323893#1 | 81 | 82 |
| A.thaliana_AT3G53500.2#1 | 83 | 84 |
| G.hirsutum_TC137472#1 | 85 | 86 |
| C.clementina_TC23768#1 | 87 | 88 |
| F.vesca_TA9870_57918#1 | 89 | 90 |
| G.hirsutum_TC160567#1 | 91 | 92 |
| G.max_Glyma19g35980.5#1 | 93 | 94 |
| G.max_Glyma03g33260.1#1 | 95 | 96 |
| G.max_Glyma19g35980.1#1 | 97 | 98 |
| G.max_TC317123#1 | 99 | 100 |
| T.aestivum_TC347767#1 | 101 | 102 |
| A.thaliana_AT2G37340.1#1 | 103 | 104 |
| A.hypogaea_EG029774#1 | 105 | 106 |
| B.napus_TC73509#1 | 107 | 108 |
| B.napus_BN06MC04617_42261920@4606#1 | 109 | 110 |
| P.virgatum_TC14454#1 | 111 | 112 |
| Poptr_ATRSZ33 like | 113 | 114 |
| V.vinifera_GSVIVT00023097001#1 | 115 | 116 |
| C.clementina_TC39204#1 | 117 | 118 |
| B.napus_TC68381#1 | 119 | 120 |
| B.rapa_TA6039_3711#1 | 121 | 122 |
| C.clementina_TC34178#1 | 123 | 124 |
| P.vulgaris_TC8698#1 | 125 | 126 |
| S.bicolor_Sb03g005500.1#1 | 127 | 128 |
| C.canephora_TC3361#1 | 129 | 130 |
| G.max_Glyma19g35990.1#1 | 131 | 132 |
| G.max_TC324192#1 | 133 | 134 |
| G.max_GM06MC33050_sl61g01@32287#1 | 135 | 136 |
| G.max_TC321743#1 | 137 | 138 |
| I.batatas_TA3421_4120#1 | 139 | 140 |
| A.comosus_DT336917#1 | 141 | 142 |
| L.japonicus_TC42099#1 | 143 | 144 |
| N.tabacum_TC40467#1 | 145 | 146 |
| G.raimondii_TC4400#1 | 147 | 148 |
| A.officinalis_TA1321_4686#1 | 149 | 150 |
| G.hirsutum_TC163142#1 | 151 | 152 |
| S.tuberosum_TC164160#1 | 153 | 154 |
| T.cacao_TC5161#1 | 155 | 156 |
| G.hirsutum_TC134110#1 | 157 | 158 |
| F.vesca_TA9810_57918#1 | 159 | 160 |
| L.japonicus_TC37427#1 | 161 | 162 |
| Triphysaria_sp_TC3067#1 | 163 | 164 |
| V.vinifera_GSVIVT00029498001#1 | 165 | 166 |
| P.taeda_TA6650_3352#1 | 167 | 168 |
| P.trifoliata_TA5898_37690#1 | 169 | 170 |
| S.bicolor_Sb09g001920.1#1 | 171 | 172 |
| S.officinarum_TC107276#1 | 173 | 174 |
| B.napus_TC84359#1 | 175 | 176 |
| Aquilegia_sp_TC24323#1 | 177 | 178 |
| P.pinaster_TA3625_71647#1 | 179 | 180 |
| P.virgatum_TC32128#1 | 181 | 182 |
| Z.mays_TC518048#1 | 183 | 184 |
| Aquilegia_sp_TC24824#1 | 185 | 186 |
| P.sitchensis_TA11267_3332#1 | 187 | 188 |
| N.tabacum_TC53470#1 | 189 | 190 |
| H.vulgare_TC154362#1 | 191 | 192 |
| T.aestivum_TC279628#1 | 193 | 194 |
| O.sativa_LOC_Os01g06290.1#1 | 195 | 196 |
| Z.mays_c68511709gm030403@11445#1 | 197 | 198 |
| Z.mays_TC527608#1 | 199 | 200 |
| O.glaberrima_Og014036.01#1 | 201 | 202 |
| O.sativa_LOC_Os03g17710.2#1 | 203 | 204 |
| P.virgatum_TC27619#1 | 205 | 206 |
| P.patens_TC31165#1 | 207 | 208 |
| S.officinarum_TC76505#1 | 209 | 210 |
| Z.mays_ZM07MC13041_BFb0138E15@13012#1 | 211 | 212 |
| M.crystallinum_TC10341#1 | 213 | 214 |
| T.aestivum_TC300145#1 | 215 | 216 |
| T.monococcum_TA2060_4568#1 | 217 | 218 |
| C.clementina_TC11431#1 | 219 | 220 |
| H.vulgare_c62741371hv270303@6248#1 | 221 | 222 |
| T.aestivum_RSZ38 | 223 | 224 |
| Z.mays_c67261821gm030403@11244#1 | 225 | 226 |
| Z.mays_TC490304#1 | 227 | 228 |
| O.sativa_LOC_Os03g17710.1#1 | 229 | 230 |
| O.sativa_LOC_Os05g07000.1#1 | 231 | 232 |
| S.bicolor_Sb09g001910.1#1 | 233 | 234 |
| Z.mays_TC510523#1 | 235 | 236 |
| Z.mays_ZM07MC35249_BFb0381I21@35142#1 | 237 | 238 |
| S.officinarum_TC80184#1 | 239 | 240 |

[0594] Sequences have been tentatively assembled and publicly disclosed by research institutions, such as The Institute for Genomic Research (TIGR; beginning with TA). The Eukaryotic Gene Orthologs (EGO) database may be used to identify such related sequences, either by keyword search or by using the BLAST algorithm with the nucleic acid sequence or polypeptide sequence of interest. Special nucleic acid sequence databases have been created for particular organisms, such as by the Joint Genome Institute. Furthermore, access to proprietary databases, has allowed the identification of novel nucleic acid and polypeptide sequences.

### Example 2

### Alignment of OsRSZ33 RRM Polypeptide Sequences

[0595] An alignment of polypeptide sequences (FIG. 2) was performed using the ClustalW (2.0) algorithm of progressive alignment (Thompson et al. (1997) Nucleic Acids Res 25:4876-4882; Chenna et al. (2003). Nucleic Acids Res 31:3497-3500) with standard setting (slow alignment, similarity matrix: Gonnet, gap opening penalty 10, gap extension penalty: 0.2). Minor manual editing was done to further optimise the alignment. The alignment shows that the N-terminal half, up to the end of the Zn Knucle domains is highly conserved.

[0596] Combination of the information on the domains in FIG. 1 and the alignment can be used for identifying the various motifs in the homologues of SEQ ID NO: 2.

[0597] A phylogenetic tree of various SR polypeptides (FIG. 3) was constructed using a ClustalW alignment (Isshiki et al., 2006). The OsRSZ33 RRM polypeptides useful in the methods of the present invention all belong to the cluster with two Zn Knuckle domains.

### Example 3

### Calculation of Global Percentage Identity Between Polypeptide Sequences

[0598] Global percentages of similarity and identity between full length polypeptide sequences useful in performing the methods of the invention were determined using one of the methods available in the art, the MatGAT (Matrix Global Alignment Tool) software (BMC Bioinformatics. 2003 4:29. MatGAT: an application that generates similarity/identity matrices using protein or DNA sequences. Campanella J J, Bitincka L, Smalley J; software hosted by Ledion Bitincka). MatGAT software generates similarity/identity matrices for DNA or protein sequences without needing pre-alignment of the data. The program performs a series of pair-wise alignments using the Myers and Miller global alignment algorithm (with a gap opening penalty of 12, and a gap extension penalty of 2), calculates similarity and identity using for example Blosum 62 (for polypeptides), and then places the results in a distance matrix. Sequence similarity is shown in the bottom half of the dividing line and sequence identity is shown in the top half of the diagonal dividing line.

[0599] Parameters used in the comparison were: Scoring matrix: Blosum62, First Gap: 12, Extending Gap: 2.

[0600] Results of the software analysis are shown in Table B for the global similarity and identity over the full length sequences from several OsRSZ33 RRM polypeptides from monocotyledonous plants. The sequence identity (in %) between the OsRSZ33 RRM polypeptide sequences useful in performing the methods of the invention can be as low as 41%, but is generally higher than 50% compared to SEQ ID NO: 2.

TABLE B

| | MatGAT results for global similarity and identity over the full length of the polypeptide sequences. | | | | | | | | | | | | | | |
|---|---|---|---|---|---|---|---|---|---|---|---|---|---|---|---|
| | 1 | 2 | 3 | 4 | 5 | 6 | 7 | 8 | 9 | 10 | 11 | 12 | 13 | 14 | 15 |
| 1. H.vulgare_@6248 | | 75.4 | 74.4 | 75.4 | 74.5 | 48.3 | 71.9 | 73.3 | 73.1 | 72.4 | 46.2 | 52.0 | 39.3 | 72.8 | 69.0 |
| 2. O.glaberrima_Og014036 | 83.5 | | 97.3 | 98.8 | 87.7 | 48.5 | 76.1 | 76.4 | 76.5 | 75.7 | 46.1 | 51.2 | 40.9 | 75.7 | 74.7 |
| 3. O.sativa_LOC_ | 83.3 | 97.6 | | 98.5 | 86.4 | 48.1 | 75.3 | 75.3 | 75.4 | 74.6 | 45.7 | 50.7 | 40.6 | 74.6 | 73.6 |
| Os03g17710.1 | | | | | | | | | | | | | | | |
| 4. O.sativa_LOC_ | 83.8 | 99.1 | 98.5 | | 87.7 | 48.8 | 76.4 | 76.7 | 76.5 | 76.0 | 46.4 | 51.5 | 41.2 | 76.0 | 74.7 |
| Os03g17710.2 | | | | | | | | | | | | | | | |
| 5. O.sativa_LOC_ | 81.1 | 90.9 | 89.9 | 91.2 | | 49.8 | 78.3 | 78.9 | 76.9 | 78.4 | 47.1 | 52.0 | 41.5 | 77.9 | 75.8 |
| Os05g02880 | | | | | | | | | | | | | | | |
| 6. P.virgatum_TC2491 | 50.5 | 51.2 | 50.7 | 51.5 | 52.3 | | 48.2 | 52.5 | 45.7 | 53.2 | 90.3 | 67.6 | 73.0 | 52.9 | 46.2 |
| 7. P.virgatum_TC27619 | 80.2 | 82.4 | 81.8 | 83.0 | 83.3 | 50.6 | | 82.8 | 85.7 | 82.0 | 46.4 | 51.8 | 41.2 | 82.3 | 82.4 |
| 8. P.virgatum_TC32128 | 79.3 | 84.8 | 83.9 | 85.5 | 86.1 | 54.1 | 87.3 | | 80.1 | 91.5 | 50.0 | 55.7 | 41.1 | 91.1 | 78.1 |
| 9. S.bicolor_Sb09g001910 | 80.9 | 81.8 | 82.1 | 82.1 | 81.5 | 48.7 | 88.0 | 85.0 | | 77.8 | 44.9 | 49.6 | 41.9 | 77.3 | 86.9 |
| 10. S.bicolor_Sb09g001920 | 80.8 | 83.6 | 82.7 | 84.2 | 85.4 | 54.2 | 86.1 | 94.6 | 82.7 | | 52.6 | 58.3 | 42.3 | 98.1 | 75.7 |
| 11. S.hybrid_CF570698 | 48.6 | 49.1 | 48.7 | 49.4 | 50.2 | 93.7 | 48.2 | 51.6 | 47.2 | 52.9 | | 67.6 | 72.0 | 52.9 | 45.0 |
| 12. S.officinarum_CA177377 | 57.4 | 57.3 | 56.7 | 57.6 | 57.0 | 69.7 | 55.2 | 58.6 | 54.0 | 59.6 | 68.1 | | 54.2 | 59.3 | 50.5 |
| 13. S.officinarum_CA282538 | 40.5 | 41.8 | 41.5 | 42.1 | 42.4 | 77.6 | 42.1 | 43.9 | 42.2 | 44.2 | 76.6 | 57.1 | | 42.3 | 43.8 |
| 14. S.officinarum_TC107276 | 79.0 | 84.2 | 83.3 | 84.8 | 84.8 | 54.2 | 87.0 | 94.9 | 82.4 | 99.0 | 52.9 | 60.3 | 44.9 | | 76.0 |
| 15. S.officinarum_TC76505 | 79.0 | 81.3 | 80.6 | 81.6 | 81.0 | 49.5 | 85.8 | 83.7 | 88.9 | 81.6 | 48.6 | 55.3 | 44.1 | 82.2 | |
| 16. S.officinarum_TC80184 | 69.9 | 75.4 | 75.7 | 75.7 | 74.9 | 45.1 | 76.2 | 76.0 | 83.6 | 73.8 | 44.0 | 51.6 | 39.9 | 73.8 | 83.3 |
| 17. S.officinarum_TC86028 | 66.1 | 66.1 | 65.4 | 66.4 | 66.3 | 59.6 | 65.5 | 69.7 | 64.2 | 70.2 | 58.9 | 65.6 | 49.3 | 70.8 | 66.2 |
| 18. T.aestivum_TC286992 | 64.9 | 61.5 | 61.5 | 62.4 | 62.5 | 77.9 | 60.9 | 64.6 | 57.8 | 65.1 | 74.7 | 74.4 | 62.2 | 65.1 | 58.9 |
| 19. T.aestivum_TC300145 | 97.6 | 85.2 | 84.8 | 85.5 | 82.5 | 50.9 | 81.0 | 82.5 | 81.5 | 82.5 | 49.1 | 57.2 | 41.0 | 82.5 | 77.7 |
| 20. T.turgidum_AJ612509 | 60.1 | 57.6 | 57.0 | 57.9 | 58.5 | 83.7 | 57.3 | 60.5 | 54.3 | 60.9 | 79.8 | 73.9 | 66.5 | 60.6 | 55.6 |
| 21. T.aestivum_RSZ38 | 96.7 | 84.1 | 83.9 | 84.4 | 82.0 | 50.8 | 80.2 | 81.7 | 80.6 | 81.7 | 48.9 | 58.0 | 40.8 | 81.7 | 76.9 |
| 22. Z.mays_@11244 | 80.5 | 84.4 | 84.2 | 84.7 | 84.7 | 49.8 | 88.6 | 86.8 | 94.1 | 85.3 | 48.9 | 56.2 | 43.2 | 85.6 | 89.8 |
| 23. Z.mays_@11445 | 82.9 | 83.9 | 83.0 | 84.5 | 84.3 | 51.7 | 85.2 | 88.9 | 83.3 | 91.7 | 50.8 | 57.2 | 42.5 | 91.4 | 81.0 |
| 24.Z.mays_TC490304 | 80.5 | 84.4 | 84.2 | 84.7 | 84.7 | 49.8 | 88.6 | 86.8 | 94.1 | 85.3 | 48.9 | 56.2 | 43.2 | 85.6 | 89.8 |
| 25. Z.mays_TC510523 | 77.9 | 78.8 | 79.0 | 79.0 | 77.6 | 47.0 | 83.0 | 80.5 | 90.1 | 78.5 | 45.9 | 51.8 | 40.5 | 78.5 | 83.9 |
| 26. Z.mays_TC518048 | 79.9 | 82.4 | 81.5 | 83.0 | 84.2 | 53.5 | 85.8 | 92.7 | 81.5 | 95.5 | 52.2 | 59.9 | 43.6 | 95.9 | 80.4 |
| 27. Z.mays_TC527608 | 82.9 | 83.9 | 83.0 | 84.5 | 83.4 | 51.7 | 84.8 | 88.9 | 83.3 | 91.7 | 50.8 | 57.8 | 42.2 | 91.4 | 81.0 |
| 28. Z.mays_@13012 | 80.5 | 84.6 | 83.9 | 84.9 | 84.9 | 50.2 | 89.4 | 86.7 | 93.3 | 85.8 | 49.2 | 56.8 | 43.5 | 86.1 | 90.0 |
| 29. Z.mays_@35142 | 78.5 | 79.3 | 79.6 | 79.6 | 78.2 | 47.3 | 83.6 | 80.7 | 90.7 | 78.8 | 45.9 | 52.7 | 40.5 | 78.8 | 84.4 |

| | 16 | 17 | 18 | 19 | 20 | 21 | 22 | 23 | 24 | 25 | 26 | 27 | 28 | 29 |
|---|---|---|---|---|---|---|---|---|---|---|---|---|---|---|
| 1. H.vulgare_@6248 | 64.8 | 58.4 | 64.6 | 95.8 | 59.8 | 96.1 | 72.6 | 74.2 | 72.6 | 71.6 | 69.7 | 75.1 | 72.1 | 72.2 |
| 2. O.glaberrima_Og014036 | 69.1 | 56.4 | 57.8 | 75.7 | 54.5 | 75.2 | 77.0 | 74.1 | 77.0 | 73.8 | 73.7 | 75.3 | 77.2 | 74.4 |
| 3. O.sativa_LOC_ | 68.2 | 55.8 | 57.9 | 74.6 | 54.0 | 74.1 | 75.9 | 73.1 | 75.9 | 72.8 | 72.6 | 74.2 | 76.1 | 73.4 |
| Os03g17710.1 | | | | | | | | | | | | | | |
| 4. O.sativa_LOC_ | 69.1 | 56.7 | 58.7 | 75.7 | 54.8 | 75.2 | 77.0 | 74.4 | 77.0 | 73.8 | 74.0 | 75.6 | 77.2 | 74.4 |
| Os03g17710.2 | | | | | | | | | | | | | | |
| 5. O.sativa_LOC_ | 69.3 | 57.1 | 58.5 | 74.5 | 55.7 | 73.8 | 78.6 | 74.9 | 78.6 | 73.0 | 75.4 | 75.8 | 78.7 | 73.6 |
| Os05g02880 | | | | | | | | | | | | | | |
| 6. P.virgatum_TC2491 | 42.1 | 57.8 | 74.2 | 48.8 | 79.8 | 48.3 | 46.5 | 49.5 | 46.5 | 43.6 | 51.3 | 49.8 | 46.8 | 43.9 |
| 7. P.virgatum_TC27619 | 72.3 | 57.9 | 58.1 | 72.1 | 54.8 | 72.2 | 85.0 | 77.6 | 85.3 | 79.9 | 79.1 | 77.9 | 85.0 | 80.5 |
| 8. P.virgatum_TC32128 | 70.5 | 62.1 | 60.4 | 73.5 | 56.6 | 73.0 | 82.1 | 82.8 | 82.1 | 75.4 | 87.4 | 83.4 | 81.2 | 75.6 |
| 9. S.bicolor_Sb09g001910 | 78.9 | 55.1 | 54.8 | 71.9 | 51.6 | 72.8 | 91.5 | 75.9 | 91.8 | 87.9 | 74.2 | 76.5 | 91.0 | 88.5 |
| 10. S.bicolor_Sb09g001920 | 69.0 | 64.8 | 61.4 | 74.0 | 57.9 | 73.8 | 80.4 | 89.3 | 80.4 | 74.1 | 93.3 | 88.7 | 80.5 | 74.4 |
| 11. S.hybrid_CF570698 | 41.3 | 58.5 | 70.5 | 46.7 | 75.4 | 46.2 | 45.6 | 49.2 | 45.6 | 42.8 | 50.3 | 48.9 | 45.9 | 42.8 |
| 12. S.officinarum_CA177377 | 45.4 | 63.1 | 69.6 | 52.7 | 68.9 | 52.6 | 50.8 | 54.2 | 50.8 | 48.4 | 57.0 | 54.8 | 51.1 | 48.4 |
| 13. S.officinarum_CA282538 | 39.6 | 46.5 | 59.4 | 39.2 | 63.5 | 39.3 | 42.0 | 40.0 | 42.0 | 39.7 | 41.4 | 39.4 | 42.3 | 39.7 |
| 14. S.officinarum_TC107276 | 68.8 | 65.7 | 60.8 | 73.1 | 57.0 | 72.9 | 80.4 | 87.8 | 80.4 | 73.8 | 92.4 | 87.8 | 80.5 | 74.1 |
| 15. S.officinarum_TC76505 | 80.5 | 56.6 | 55.6 | 68.2 | 52.6 | 67.6 | 86.1 | 71.8 | 86.4 | 80.8 | 73.9 | 72.4 | 86.3 | 81.4 |
| 16. S.officinarum_TC80184 | | 51.5 | 50.8 | 64.1 | 47.3 | 64.8 | 76.2 | 67.1 | 76.5 | 76.4 | 65.5 | 67.7 | 75.4 | 76.6 |
| 17. S.officinarum_TC86028 | 60.1 | | 60.8 | 57.7 | 60.6 | 57.6 | 56.0 | 59.8 | 56.0 | 53.9 | 61.4 | 59.8 | 57.5 | 53.1 |
| 18. T.aestivum_TC286992 | 53.8 | 68.4 | | 65.1 | 92.6 | 65.2 | 56.1 | 58.1 | 56.1 | 53.5 | 60.1 | 59.0 | 56.5 | 53.8 |
| 19. T.aestivum_TC300145 | 69.9 | 64.5 | 65.4 | | 60.2 | 96.4 | 71.6 | 74.7 | 71.6 | 70.4 | 70.9 | 75.6 | 72.0 | 71.0 |
| 20. T.turgidum_AJ612509 | 50.5 | 66.3 | 92.6 | 60.5 | | 60.4 | 52.5 | 54.4 | 52.5 | 49.9 | 55.7 | 55.3 | 52.9 | 50.1 |
| 21. T.aestivum_RSZ38 | 70.5 | 67.0 | 65.2 | 97.9 | 60.4 | | 71.7 | 74.8 | 71.7 | 71.3 | 70.8 | 75.6 | 72.1 | 71.9 |
| 22. Z.mays_@11244 | 80.6 | 62.8 | 59.8 | 82.0 | 55.6 | 81.1 | | 76.0 | 99.7 | 84.2 | 76.9 | 76.3 | 98.8 | 84.8 |
| 23. Z.mays_@11445 | 73.5 | 66.8 | 62.8 | 84.6 | 58.5 | 83.8 | 84.1 | | 76.0 | 72.4 | 88.8 | 96.0 | 76.5 | 72.7 |
| 24.Z.mays_TC490304 | 80.6 | 62.8 | 59.8 | 82.0 | 55.6 | 81.1 | 100.0 | 84.1 | | 84.5 | 76.9 | 76.3 | 98.5 | 85.1 |
| 25. Z.mays_TC510523 | 80.3 | 61.5 | 56.7 | 78.2 | 53.0 | 77.9 | 87.3 | 77.9 | 87.3 | | 71.1 | 73.2 | 83.7 | 99.4 |
| 26. Z.mays_TC518048 | 72.4 | 69.7 | 65.0 | 81.6 | 60.2 | 81.1 | 83.8 | 91.4 | 83.8 | 77.6 | | 84.8 | 77.1 | 71.4 |
| 27. Z.mays_TC527608 | 73.5 | 66.8 | 62.8 | 84.6 | 58.5 | 83.8 | 84.1 | 98.8 | 84.1 | 77.9 | 90.2 | | 76.8 | 73.5 |
| 28. Z.mays_@13012 | 80.1 | 63.7 | 60.1 | 82.2 | 55.9 | 80.8 | 99.1 | 84.3 | 99.1 | 86.7 | 84.3 | 84.3 | | 84.2 |
| 29. Z.mays_@35142 | 80.6 | 61.8 | 56.9 | 78.8 | 53.3 | 78.5 | 87.8 | 78.2 | 87.8 | 99.4 | 77.9 | 78.2 | 87.3 | |

### Example 4

### Identification of Domains Comprised in Polypeptide Sequences Useful in Performing the Methods of the Invention

[0601] The Integrated Resource of Protein Families, Domains and Sites (InterPro) database is an integrated interface for the commonly used signature databases for text- and sequence-based searches. The InterPro database combines these databases, which use different methodologies and varying degrees of biological information about well-characterized proteins to derive protein signatures. Collaborating databases include SWISS-PROT, PROSITE, TrEMBL, PRINTS, ProDom and Pfam, Smart and TIGRFAMs. Pfam is a large collection of multiple sequence alignments and hidden Markov models covering many common protein domains and families. Pfam is hosted at the Sanger Institute server in the United Kingdom. Interpro is hosted at the European Bioinformatics Institute in the United Kingdom.

[0602] The results of the InterPro scan of the polypeptide sequence as represented by SEQ ID NO: 2 are presented in Table C.

TABLE C
InterPro scan results (major accession numbers) of the polypeptide sequence as
represented by SEQ ID NO: 2.

| Database | Number | Name | start | stop | p-value | Accession |
|---|---|---|---|---|---|---|
| ProfileScan | PS50158 | ZF_CCHC | 103 | 118 | 0.00E+00 | IPR001878 |
| ProfileScan | PS50158 | ZF_CCHC | 125 | 141 | 0.00E+00 | IPR001878 |
| Gene3D | G3DSA: 3.30.70.330 | a_b_plait_nuc_bd | 9 | 119 | 6.60E−07 | IPR012677 |
| superfamily | SSF54928 | SSF54928 | 3 | 103 | 2.40E−04 | NULL |
| HMMSmart | SM00343 | ZnF_C2HC | 103 | 119 | 6.00E+08 | IPR001878 |
| HMMSmart | SM00343 | ZnF_C2HC | 125 | 141 | 2.10E+08 | IPR001878 |
| HMMPanther | PTHR10548 | PTHR10548 | 10 | 281 | 7.10E−36 | NULL |
| HMMPanther | PTHR10548 | PTHR10548 | 10 | 281 | 7.10E−36 | NULL |
| superfamily | SSF57756 | SSF57756 | 90 | 145 | 4.30E+04 | NULL |
| ProfileScan | PS50102 | RRM | 11 | 81 | 0.00E+00 | IPR000504 |
| HMMPfam | PF00098 | zf-CCHC | 102 | 119 | 1.50E−03 | IPR001878 |
| HMMPfam | PF00098 | zf-CCHC | 124 | 141 | 1.30E−02 | IPR001878 |
| HMMPfam | PF00076 | RRM_1 | 13 | 75 | 7.60E+00 | IPR000504 |
| HMMSmart | SM00360 | RRM | 12 | 77 | 1.60E−06 | IPR000504 |

### Example 5

### Topology Prediction of the OsRSZ33 RRM Polypeptide Sequences

[0603] TargetP 1.1 predicts the subcellular location of eukaryotic proteins. The location assignment is based on the predicted presence of any of the N-terminal pre-sequences: chloroplast transit peptide (cTP), mitochondrial targeting peptide (mTP) or secretory pathway signal peptide (SP). Scores on which the final prediction is based are not really probabilities, and they do not necessarily add to one. However, the location with the highest score is the most likely according to TargetP, and the relationship between the scores (the reliability class) may be an indication of how certain the prediction is. The reliability class (RC) ranges from 1 to 5, where 1 indicates the strongest prediction. TargetP is maintained at the server of the Technical University of Denmark.

[0604] For the sequences predicted to contain an N-terminal presequence a potential cleavage site can also be predicted.

[0605] A number of parameters were selected, such as organism group (non-plant or plant), cutoff sets (none, predefined set of cutoffs, or user-specified set of cutoffs), and the calculation of prediction of cleavage sites (yes or no).

[0606] The results of TargetP 1.1 analysis of the polypeptide sequence as represented by SEQ ID NO: 2 are presented Table D. The “plant” organism group has been selected, no cutoffs defined, and the predicted length of the transit peptide requested. The subcellular localization of the polypeptide sequence as represented by SEQ ID NO: 2 is predicted to be the mitochondrion, no transit peptide is predicted.

TABLE D
TargetP 1.1 analysis of the polypeptide sequence as represented by SEQ ID NO:
2. Abbreviations: Len, Length; cTP, Chloroplastic transit peptide; mTP, Mitochondrial
transit peptide, SP, Secretory pathway signal peptide, other, Other subcellular targeting,
Loc, Predicted Location; RC, Reliability class; TPlen, Predicted transit peptide length.

| Name | Len | cTP | mTP | SP | other | Loc | RC | TPlen |
|---|---|---|---|---|---|---|---|---|
| OsRSZ33 | 323 | 0.020 | 0.914 | 0.012 | 0.270 | M | 2 | 46 |
| cutoff | | 0.000 | 0.000 | 0.000 | 0.000 | | | |

[0607] Many other algorithms can be used to perform such analyses, including:
[0608] ChloroP 1.1 hosted on the server of the Technical University of Denmark;
[0609] Protein Prowler Subcellular Localisation Predictor version 1.2 hosted on the server of the Institute for Molecular Bioscience, University of Queensland, Brisbane, Australia;
[0610] PENCE Proteome Analyst PA-GOSUB 2.5 hosted on the server of the University of Alberta, Edmonton, Alberta, Canada;
[0611] TMHMM, hosted on the server of the Technical University of Denmark
[0612] PSORT (URL: psort.org)
[0613] PLOC (Park and Kanehisa, Bioinformatics, 19, 1656-1663, 2003).

### Example 6

### Functional Assay for the OsRSZ33 RRM Polypeptide

[0614] OsRSZ33 RRM proteins are postulated to interact with other SR proteins. Reference is made to the yeast two-hybrid assay with atRSZ33 as described in Lopato et al. 2002 and to the pull-down assay described by Lorkovic et al. (Exp. Cell Res. 314, 3175-3186, 2008).

### Example 7

### Cloning of the OsRSZ33 RRM Encoding Nucleic Acid Sequence

[0615] The nucleic acid sequence was amplified by PCR using as template a custom-made Oryza sativa seedlings cDNA library (in pCMV Sport 6.0; Invitrogen, Paisley, UK). PCR was performed using Hifi Taq DNA polymerase in standard conditions, using 200 ng of template in a 50 μl PCR mix. The primers used were prm15077 (SEQ ID NO: 248; sense, start codon in bold): 5′-ggggacaagtttgtacaaaaaagcaggcttaaacaatgccgcgctatgatga-3′ and prm15078 (SEQ ID NO: 249; reverse, complementary): 5′-ggggaccactttgtacaagaaagctgggtactgcgattaa atttcaggct-3′, which include the AttB sites for Gateway recombination. The amplified PCR fragment was purified also using standard methods. The first step of the Gateway procedure, the BP reaction, was then performed, during which the PCR fragment recombined in vivo with the pDONR201 plasmid to produce, according to the Gateway terminology, an “entry clone”, pOsRSZ33 RRM. Plasmid pDONR201 was purchased from Invitrogen, as part of the Gateway® technology.

[0616] The entry clone comprising SEQ ID NO: 1 was then used in an LR reaction with a destination vector used for Oryza sativa transformation. This vector contained as functional elements within the T-DNA borders: a plant selectable marker; a screenable marker expression cassette; and a Gateway cassette intended for LR in vivo recombination with the nucleic acid sequence of interest already cloned in the entry clone. A rice GOS2 promoter (SEQ ID NO: 247) for constitutive expression was located upstream of this Gateway cassette.

[0617] After the LR recombination step, the resulting expression vector pGOS2::OsRSZ33 RRM (FIG. 4) was transformed into Agrobacterium strain LBA4044 according to methods well known in the art.

### Example 8

### Plant Transformation

### Rice Transformation

[0618] The Agrobacterium containing the expression vector was used to transform Oryza sativa plants. Mature dry seeds of the rice japonica cultivar Nipponbare were dehusked. Sterilization was carried out by incubating for one minute in 70% ethanol, followed by 30 minutes in 0.2% HgCl₂, followed by a 6 times 15 minutes wash with sterile distilled water. The sterile seeds were then germinated on a medium containing 2,4-D (callus induction medium). After incubation in the dark for four weeks, embryogenic, scutellum-derived calli were excised and propagated on the same medium. After two weeks, the calli were multiplied or propagated by subculture on the same medium for another 2 weeks. Embryogenic callus pieces were sub-cultured on fresh medium 3 days before co-cultivation (to boost cell division activity).

[0619] Agrobacterium strain LBA4404 containing the expression vector was used for co-cultivation. Agrobacterium was inoculated on AB medium with the appropriate antibiotics and cultured for 3 days at 28° C. The bacteria were then collected and suspended in liquid co-cultivation medium to a density (OD₆₀₀) of about 1. The suspension was then transferred to a Petri dish and the calli immersed in the suspension for 15 minutes. The callus tissues were then blotted dry on a filter paper and transferred to solidified, co-cultivation medium and incubated for 3 days in the dark at 25° C. Co-cultivated calli were grown on 2,4-D-containing medium for 4 weeks in the dark at 28° C. in the presence of a selection agent. During this period, rapidly growing resistant callus islands developed. After transfer of this material to a regeneration medium and incubation in the light, the embryogenic potential was released and shoots developed in the next four to five weeks. Shoots were excised from the calli and incubated for 2 to 3 weeks on an auxin-containing medium from which they were transferred to soil. Hardened shoots were grown under high humidity and short days in a greenhouse.

[0620] Approximately 35 independent T0 rice transformants were generated for one construct. The primary transformants were transferred from a tissue culture chamber to a greenhouse. After a quantitative PCR analysis to verify copy number of the T-DNA insert, only single copy transgenic plants that exhibit tolerance to the selection agent were kept for harvest of T1 seed. Seeds were then harvested three to five months after transplanting. The method yielded single locus transformants at a rate of over 50% (Aldemita and Hodges 1996, Chan et al. 1993, Hiei et al. 1994).

### Example 9

### Transformation of Other Crops

### Corn Transformation

[0621] Transformation of maize (Zea mays) is performed with a modification of the method described by Ishida et al. (1996) Nature Biotech 14(6): 745-50. Transformation is genotype-dependent in corn and only specific genotypes are amenable to transformation and regeneration. The inbred line A188 (University of Minnesota) or hybrids with A188 as a parent are good sources of donor material for transformation, but other genotypes can be used successfully as well. Ears are harvested from corn plant approximately 11 days after pollination (DAP) when the length of the immature embryo is about 1 to 1.2 mm. Immature embryos are cocultivated with Agrobacterium tumefaciens containing the expression vector, and transgenic plants are recovered through organogenesis. Excised embryos are grown on callus induction medium, then maize regeneration medium, containing the selection agent (for example imidazolinone but various selection markers can be used). The Petri plates are incubated in the light at 25° C. for 2-3 weeks, or until shoots develop. The green shoots are transferred from each embryo to maize rooting medium and incubated at 25° C. for 2-3 weeks, until roots develop. The rooted shoots are transplanted to soil in the greenhouse. T1 seeds are produced from plants that exhibit tolerance to the selection agent and that contain a single copy of the T-DNA insert.

### Wheat Transformation

[0622] Transformation of wheat is performed with the method described by Ishida et al. (1996) Nature Biotech 14(6): 745-50. The cultivar Bobwhite (available from CIMMYT, Mexico) is commonly used in transformation. Immature embryos are co-cultivated with Agrobacterium tumefaciens containing the expression vector, and transgenic plants are recovered through organogenesis. After incubation with Agrobacterium, the embryos are grown in vitro on callus induction medium, then regeneration medium, containing the selection agent (for example imidazolinone but various selection markers can be used). The Petri plates are incubated in the light at 25° C. for 2-3 weeks, or until shoots develop. The green shoots are transferred from each embryo to rooting medium and incubated at 25° C. for 2-3 weeks, until roots develop. The rooted shoots are transplanted to soil in the greenhouse. T1 seeds are produced from plants that exhibit tolerance to the selection agent and that contain a single copy of the T-DNA insert.

### Soybean Transformation

[0623] Soybean is transformed according to a modification of the method described in the Texas A&M patent U.S. Pat. No. 5,164,310. Several commercial soybean varieties are amenable to transformation by this method. The cultivar Jack (available from the Illinois Seed foundation) is commonly used for transformation. Soybean seeds are sterilised for in vitro sowing. The hypocotyl, the radicle and one cotyledon are excised from seven-day old young seedlings. The epicotyl and the remaining cotyledon are further grown to develop axillary nodes. These axillary nodes are excised and incubated with Agrobacterium tumefaciens containing the expression vector. After the cocultivation treatment, the explants are washed and transferred to selection media. Regenerated shoots are excised and placed on a shoot elongation medium. Shoots no longer than 1 cm are placed on rooting medium until roots develop. The rooted shoots are transplanted to soil in the greenhouse. T1 seeds are produced from plants that exhibit tolerance to the selection agent and that contain a single copy of the T-DNA insert.

### Rapeseed/Canola Transformation

[0624] Cotyledonary petioles and hypocotyls of 5-6 day old young seedling are used as explants for tissue culture and transformed according to Babic et al. (1998, Plant Cell Rep 17: 183-188). The commercial cultivar Westar (Agriculture Canada) is the standard variety used for transformation, but other varieties can also be used. Canola seeds are surface-sterilized for in vitro sowing. The cotyledon petiole explants with the cotyledon attached are excised from the in vitro seedlings, and inoculated with Agrobacterium (containing the expression vector) by dipping the cut end of the petiole explant into the bacterial suspension. The explants are then cultured for 2 days on MSBAP-3 medium containing 3 mg/l BAP, 3% sucrose, 0.7% Phytagar at 23° C., 16 hr light. After two days of co-cultivation with Agrobacterium, the petiole explants are transferred to MSBAP-3 medium containing 3 mg/l BAP, cefotaxime, carbenicillin, or timentin (300 mg/l) for 7 days, and then cultured on MSBAP-3 medium with cefotaxime, carbenicillin, or timentin and selection agent until shoot regeneration. When the shoots are 5-10 mm in length, they are cut and transferred to shoot elongation medium (MSBAP-0.5, containing 0.5 mg/l BAP). Shoots of about 2 cm in length are transferred to the rooting medium (MS0) for root induction. The rooted shoots are transplanted to soil in the greenhouse. T1 seeds are produced from plants that exhibit tolerance to the selection agent and that contain a single copy of the T-DNA insert.

### Alfalfa Transformation

[0625] A regenerating clone of alfalfa (Medicago sativa) is transformed using the method of (McKersie et al., 1999 Plant Physiol 119: 839-847). Regeneration and transformation of alfalfa is genotype dependent and therefore a regenerating plant is required. Methods to obtain regenerating plants have been described. For example, these can be selected from the cultivar Rangelander (Agriculture Canada) or any other commercial alfalfa variety as described by Brown D C W and A Atanassov (1985. Plant Cell Tissue Organ Culture 4: 111-112). Alternatively, the RA3 variety (University of Wisconsin) has been selected for use in tissue culture (Walker et al., 1978 Am J Bot 65:654-659). Petiole explants are cocultivated with an overnight culture of Agrobacterium tumefaciens C58C1 pMP90 (McKersie et al., 1999 Plant Physiol 119: 839-847) or LBA4404 containing the expression vector. The explants are cocultivated for 3 d in the dark on SH induction medium containing 288 mg/L Pro, 53 mg/L thioproline, 4.35 g/L K2SO4, and 100 μm acetosyringinone. The explants are washed in half-strength Murashige-Skoog medium (Murashige and Skoog, 1962) and plated on the same SH induction medium without acetosyringinone but with a suitable selection agent and suitable antibiotic to inhibit Agrobacterium growth. After several weeks, somatic embryos are transferred to BOi2Y development medium containing no growth regulators, no antibiotics, and 50 g/L sucrose. Somatic embryos are subsequently germinated on half-strength Murashige-Skoog medium. Rooted seedlings were transplanted into pots and grown in a greenhouse. T1 seeds are produced from plants that exhibit tolerance to the selection agent and that contain a single copy of the T-DNA insert.

### Cotton Transformation

[0626] Cotton is transformed using Agrobacterium tumefaciens according to the method described in U.S. Pat. No. 5,159,135. Cotton seeds are surface sterilised in 3% sodium hypochlorite solution during 20 minutes and washed in distilled water with 500 μg/ml cefotaxime. The seeds are then transferred to SH-medium with 50 μg/ml benomyl for germination. Hypocotyls of 4 to 6 days old seedlings are removed, cut into 0.5 cm pieces and are placed on 0.8% agar. An Agrobacterium suspension (approx. 108 cells per ml, diluted from an overnight culture transformed with the gene of interest and suitable selection markers) is used for inoculation of the hypocotyl explants. After 3 days at room temperature and lighting, the tissues are transferred to a solid medium (1.6 g/l Gelrite) with Murashige and Skoog salts with B5 vitamins (Gamborg et al., Exp. Cell Res. 50:151-158 (1968)), 0.1 mg/l 2,4-D, 0.1 mg/l 6-furfurylaminopurine and 750 μg/ml MgCL2, and with 50 to 100 μg/ml cefotaxime and 400-500 μg/ml carbenicillin to kill residual bacteria. Individual cell lines are isolated after two to three months (with subcultures every four to six weeks) and are further cultivated on selective medium for tissue amplification (30° C., 16 hr photoperiod). Transformed tissues are subsequently further cultivated on non-selective medium during 2 to 3 months to give rise to somatic embryos. Healthy looking embryos of at least 4 mm length are transferred to tubes with SH medium in fine vermiculite, supplemented with 0.1 mg/l indole acetic acid, 6 furfurylaminopurine and gibberellic acid. The embryos are cultivated at 30° C. with a photoperiod of 16 hrs, and plantlets at the 2 to 3 leaf stage are transferred to pots with vermiculite and nutrients. The plants are hardened and subsequently moved to the greenhouse for further cultivation.

### Sugarbeet Transformation

[0627] Seeds of sugarbeet (Beta vulgaris L.) are sterilized in 70% ethanol for one minute followed by 20 min. shaking in 20% Hypochlorite bleach e.g. Clorox® regular bleach (commercially available from Clorox, 1221 Broadway, Oakland, Calif. 94612, USA). Seeds are rinsed with sterile water and air dried followed by plating onto germinating medium (Murashige and Skoog (MS) based medium (Murashige, T., and Skoog, 1962. Physiol. Plant, vol. 15, 473-497) including B5 vitamins (Gamborg et al.; Exp. Cell Res., vol. 50, 151-8.) supplemented with 10 g/l sucrose and 0.8% agar). Hypocotyl tissue is used essentially for the initiation of shoot cultures according to Hussey and Hepher (Hussey, G., and Hepher, A., 1978. Annals of Botany, 42, 477-9) and are maintained on MS based medium supplemented with 30 g/l sucrose plus 0.25 mg/l benzylamino purine and 0.75% agar, pH 5.8 at 23-25° C. with a 16-hour photoperiod. Agrobacterium tumefaciens strain carrying a binary plasmid harbouring a selectable marker gene, for example nptII, is used in transformation experiments. One day before transformation, a liquid LB culture including antibiotics is grown on a shaker (28° C., 150 rpm) until an optical density (O.D.) at 600 nm of ˜1 is reached. Overnight-grown bacterial cultures are centrifuged and resuspended in inoculation medium (O.D. ˜1) including Acetosyringone, pH 5.5. Shoot base tissue is cut into slices (1.0 cm×1.0 cm×2.0 mm approximately). Tissue is immersed for 30 s in liquid bacterial inoculation medium. Excess liquid is removed by filter paper blotting. Co-cultivation occurred for 24-72 hours on MS based medium incl. 30 g/l sucrose followed by a non-selective period including MS based medium, 30 g/l sucrose with 1 mg/l BAP to induce shoot development and cefotaxim for eliminating the Agrobacterium. After 3-10 days explants are transferred to similar selective medium harbouring for example kanamycin or G418 (50-100 mg/l genotype dependent). Tissues are transferred to fresh medium every 2-3 weeks to maintain selection pressure. The very rapid initiation of shoots (after 3-4 days) indicates regeneration of existing meristems rather than organogenesis of newly developed transgenic meristems. Small shoots are transferred after several rounds of subculture to root induction medium containing 5 mg/l NAA and kanamycin or G418. Additional steps are taken to reduce the potential of generating transformed plants that are chimeric (partially transgenic). Tissue samples from regenerated shoots are used for DNA analysis. Other transformation methods for sugarbeet are known in the art, for example those by Linsey & Gallois (Linsey, K., and Gallois, P., 1990. Journal of Experimental Botany; vol. 41, No. 226; 529-36) or the methods published in the international application published as WO9623891A.

### Sugarcane Transformation

[0628] Spindles are isolated from 6-month-old field grown sugarcane plants (see Arencibia et al., 1998. Transgenic Research, vol. 7, 213-22; Enriquez-Obregon et al., 1998. Planta, vol. 206, 20-27). Material is sterilized by immersion in a 20% Hypochlorite bleach e.g. Clorox® regular bleach (commercially available from Clorox, 1221 Broadway, Oakland, Calif. 94612, USA) for 20 minutes. Transverse sections around 0.5 cm are placed on the medium in the top-up direction. Plant material is cultivated for 4 weeks on MS (Murashige, T., and Skoog, 1962. Physiol. Plant, vol. 15, 473-497) based medium incl. B5 vitamins (Gamborg, O., et al., 1968. Exp. Cell Res., vol. 50, 151-8) supplemented with 20 g/l sucrose, 500 mg/l casein hydrolysate, 0.8% agar and 5 mg/l 2,4-D at 23° C. in the dark. Cultures are transferred after 4 weeks onto identical fresh medium. Agrobacterium tumefaciens strain carrying a binary plasmid harbouring a selectable marker gene, for example hpt, is used in transformation experiments. One day before transformation, a liquid LB culture including antibiotics is grown on a shaker (28° C., 150 rpm) until an optical density (O.D.) at 600 nm of ˜0.6 is reached. Overnight-grown bacterial cultures are centrifuged and resuspended in MS based inoculation medium (O.D. ˜0.4) including acetosyringone, pH 5.5. Sugarcane embryogenic callus pieces (2-4 mm) are isolated based on morphological characteristics as compact structure and yellow colour and dried for 20 min. in the flow hood followed by immersion in a liquid bacterial inoculation medium for 10-20 minutes. Excess liquid is removed by filter paper blotting. Co-cultivation occurred for 3-5 days in the dark on filter paper which is placed on top of MS based medium incl. B5 vitamins containing 1 mg/l 2,4-D. After co-cultivation calli are washed with sterile water followed by a non-selective cultivation period on similar medium containing 500 mg/l cefotaxime for eliminating remaining Agrobacterium cells. After 3-10 days explants are transferred to MS based selective medium incl. B5 vitamins containing 1 mg/l 2,4-D for another 3 weeks harbouring 25 mg/l of hygromycin (genotype dependent). All treatments are made at 23° C. under dark conditions. Resistant calli are further cultivated on medium lacking 2,4-D including 1 mg/l BA and 25 mg/l hygromycin under 16 h light photoperiod resulting in the development of shoot structures. Shoots are isolated and cultivated on selective rooting medium (MS based including, 20 g/l sucrose, 20 mg/l hygromycin and 500 mg/l cefotaxime). Tissue samples from regenerated shoots are used for DNA analysis. Other transformation methods for sugarcane are known in the art, for example from the in-ternational application published as WO2010/151634A and the granted European patent EP1831378.

### Example 10

### Phenotypic Evaluation Procedure

### 10.1 Evaluation Setup

[0629] Approximately 35 independent T0 rice transformants were generated. The primary transformants were transferred from a tissue culture chamber to a greenhouse for growing and harvest of T1 seed. Six events, of which the T1 progeny segregated 3:1 for presence/absence of the transgene, were retained. For each of these events, approximately 10 T1 seedlings containing the transgene (hetero- and homo-zygotes) and approximately 10 T1 seedlings lacking the transgene (nullizygotes) were selected by monitoring visual marker expression. The transgenic plants and the corresponding nullizygotes were grown side-by-side at random positions. Greenhouse conditions were of shorts days (12 hours light), 28° C. in the light and 22° C. in the dark, and a relative humidity of 70%. Plants grown under non-stress conditions were watered at regular intervals to ensure that water and nutrients were not limiting and to satisfy plant needs to complete growth and development.

[0630] From the stage of sowing until the stage of maturity the plants were passed several times through a digital imaging cabinet. At each time point digital images (2048×1536 pixels, 16 million colours) were taken of each plant from at least 6 different angles.

### Drought Screen

[0631] Plants from T2 seeds are grown in potting soil under normal conditions until they approached the heading stage. They are then transferred to a “dry” section where irrigation is withheld. Humidity probes are inserted in randomly chosen pots to monitor the soil water content (SWC). When SWC goes below certain thresholds, the plants are automatically re-watered continuously until a normal level is reached again. The plants are then re-transferred again to normal conditions. The rest of the cultivation (plant maturation, seed harvest) is the same as for plants not grown under abiotic stress conditions. Growth and yield parameters are recorded as detailed for growth under normal conditions.

### Nitrogen Use Efficiency Screen

[0632] Rice plants from T2 seeds are grown in potting soil under normal conditions except for the nutrient solution. The pots are watered from transplantation to maturation with a specific nutrient solution containing reduced N nitrogen (N) content, usually between 7 to 8 times less. The rest of the cultivation (plant maturation, seed harvest) is the same as for plants not grown under abiotic stress. Growth and yield parameters are recorded as detailed for growth under normal conditions.

### Salt Stress Screen

[0633] Plants are grown on a substrate made of coco fibers and argex (3 to 1 ratio). A normal nutrient solution is used during the first two weeks after transplanting the plantlets in the greenhouse. After the first two weeks, 25 mM of salt (NaCl) is added to the nutrient solution, until the plants are harvested. Seed-related parameters are then measured.

### 10.2 Statistical Analysis: F Test

[0634] A two factor ANOVA (analysis of variants) was used as a statistical model for the overall evaluation of plant phenotypic characteristics. An F test was carried out on all the parameters measured of all the plants of all the events transformed with the gene of the present invention. The F test was carried out to check for an effect of the gene over all the transformation events and to verify for an overall effect of the gene, also known as a global gene effect. The threshold for significance for a true global gene effect was set at a 5% probability level for the F test. A significant F test value points to a gene effect, meaning that it is not only the mere presence or position of the gene that is causing the differences in phenotype.

### 10.3 Parameters Measured

### Biomass-Related Parameter Measurement

[0635] From the stage of sowing until the stage of maturity the plants were passed several times through a digital imaging cabinet. At each time point digital images (2048×1536 pixels, 16 million colours) were taken of each plant from at least 6 different angles.

[0636] The plant aboveground area (or leafy biomass) was determined by counting the total number of pixels on the digital images from aboveground plant parts discriminated from the background. This value was averaged for the pictures taken on the same time point from the different angles and was converted to a physical surface value expressed in square mm by calibration. Experiments show that the aboveground plant area measured this way correlates with the biomass of plant parts above ground. The above ground area is the area measured at the time point at which the plant had reached its maximal leafy biomass. The early vigour is the plant (seedling) aboveground area three weeks post-germination. Increase in root biomass is expressed as an increase in total root biomass (measured as maximum biomass of roots observed during the lifespan of a plant); or as an increase in the root/shoot index (measured as the ratio between root mass and shoot mass in the period of active growth of root and shoot).

[0637] Early vigour was determined by counting the total number of pixels from aboveground plant parts discriminated from the background. This value was averaged for the pictures taken on the same time point from different angles and was converted to a physical surface value expressed in square mm by calibration. The results described below are for plants three weeks post-germination.

### Seed-Related Parameter Measurements

[0638] The mature primary panicles were harvested, counted, bagged, barcode-labelled and then dried for three days in an oven at 37° C. The panicles were then threshed and all the seeds were collected and counted. The filled husks were separated from the empty ones using an air-blowing device. The empty husks were discarded and the remaining fraction was counted again. The filled husks were weighed on an analytical balance. The number of filled seeds was determined by counting the number of filled husks that remained after the separation step. The total seed yield was measured by weighing all filled husks harvested from a plant. Total seed number per plant was measured by counting the number of husks harvested from a plant. Thousand Kernel Weight (TKW) is extrapolated from the number of filled seeds counted and their total weight. The Harvest Index (HI) in the present invention is defined as the ratio between the total seed yield and the above ground area (mm²), multiplied by a factor 10⁶. The total number of flowers per panicle as defined in the present invention is the ratio between the total number of seeds and the number of mature primary panicles. The seed fill rate as defined in the present invention is the proportion (expressed as a %) of the number of filled seeds over the total number of seeds (or florets).

### Examples 11

### Results of the Phenotypic Evaluation of the Transgenic Plants

[0639] Evaluation of transgenic T1 rice plants expressing the nucleic acid encoding the OsRSZ33 RRM protein of SEQ ID NO: 2 under control of the rice GOS2 promoter and grown under normal conditions, revealed that these plants had an improved early vigour and increased yield. In particular the plants showed increased biomass and had a higher seed yield. Details are presented in Table E. AreaMax is a parameter reflecting the above-ground biomass whereas GravityYMax is an indication of plant height, EmerVigor is early vigour, root biomass is reflected by the RootMax, RootSHInd and the RootThickMax parameters, seed yield is reflected by totalwgseeds, nrtotalseed, harvestindex, nrfilledseed. The firstpan parameter represents the number of panicles in the first flush.

TABLE E
Data summary for transgenic rice plants; for each parameter,
the percentage overall increase is shown; for each parameter
the p-value is <0.05 and the increase is above 5%.

| Parameter | Overall increase |
|---|---|
| AreaMax | 8.5 |
| EmerVigor | 20.2 |
| RootMax | 11.3 |
| RootShInd | 5.8 |
| totalwgseeds | 27.9 |
| nrtotalseed | 19.7 |
| harvestindex | 18.8 |
| firstpan | 19.7 |
| nrfilledseed | 26.2 |
| GravityYMax | 6.9 |
| RootThickMax | 7.9 |

### Example 12

### Identification of Sequences Related to SEQ ID NO: 250 and SEQ ID NO: 251

[0640] Sequences (full length cDNA, ESTs or genomic) related to SEQ ID NO: 250 and SEQ ID NO: 251 were identified amongst those maintained in the Entrez Nucleotides database at the National Center for Biotechnology Information (NCBI) using database sequence search tools, such as the Basic Local Alignment Tool (BLAST) (Altschul et al. (1990) J. Mol. Biol. 215:403-410; and Altschul et al. (1997) Nucleic Acids Res. 25:3389-3402). The program is used to find regions of local similarity between sequences by comparing nucleic acid or polypeptide sequences to sequence databases and by calculating the statistical significance of matches. For example, the polypeptide encoded by the nucleic acid of SEQ ID NO: 250 was used for the TBLASTN algorithm, with default settings and the filter to ignore low complexity sequences set off. The output of the analysis was viewed by pairwise comparison, and ranked according to the probability score (E-value), where the score reflect the probability that a particular alignment occurs by chance (the lower the E-value, the more significant the hit). In addition to E-values, comparisons were also scored by percentage identity. Percentage identity refers to the number of identical nucleotides (or amino acids) between the two compared nucleic acid (or polypeptide) sequences over a particular length. In some instances, the default parameters may be adjusted to modify the stringency of the search. For example the E-value may be increased to show less stringent matches. This way, short nearly exact matches may be identified.

[0641] Table F provides SEQ ID NO: 250 and SEQ ID NO: 251 and a list of nucleic acid sequences related to SEQ ID NO: 250 and SEQ ID NO: 251.

TABLE F

| | Nucleic | |
|---|---|---|
| | acid | Protein |
| | SEQ ID | SEQ ID |
| Name of gene from a plant source | NO: | NO: |
| >O.sativa_LOC_Os03g51459.1 | 250 | 251 |
| >A.acetabulum_TA54_35845 | 252 | 253 |
| >A.capillus-veneris_BP912995 | 254 | 255 |
| >A.cepa_CF450030 | 256 | 257 |
| >A.hypogaea_EE126007 | 258 | 259 |
| >A.lyrata_490696 | 260 | 261 |
| >A.lyrata_899434 | 262 | 263 |
| >A.lyrata_925291 | 264 | 265 |
| >A.ostenfeldii_s_ao001019065r | 266 | 267 |
| >A.sativa_CN817242 | 268 | 269 |
| >A.stolonifera_DV867767 | 270 | 271 |
| >A.stolonifera_TA231_63632 | 272 | 273 |
| >A.thaliana_AT2G21640.1 | 274 | 275 |
| >A.thaliana_AT3G05570.1 | 276 | 277 |
| >A.thaliana_AT4G39235 | 278 | 279 |
| >A.trichopoda_CK760605 | 280 | 281 |
| >Aquilegia_sp_DR926960 | 282 | 283 |
| >B.distachyon_DV476865 | 284 | 285 |
| >B.napus_BN06MC17528_45500759 | 286 | 287 |
| B.napus_EV018535 | 288 | 289 |
| B.napus_TC83237 | 290 | 291 |
| B.napus_TC89650 | 292 | 293 |
| B.napus_TC90230 | 294 | 295 |
| B.napus_TC91334 | 296 | 297 |
| B.napus_TC97660 | 298 | 299 |
| B.pendula_AF124839 | 300 | 301 |
| B.pendula_X77601 | 302 | 303 |
| B.rapa_L37464 | 304 | 305 |
| C.annuum_GD122922 | 306 | 307 |
| C.annuum_TC18479 | 308 | 309 |
| C.annuum_TC26276 | 310 | 311 |
| C.canephora_DV681808 | 312 | 313 |
| C.canephora_DV695337 | 314 | 315 |
| C.cohnii_c_crco7281_t | 316 | 317 |
| C.intybus_TA3382_13427 | 318 | 319 |
| C.japonica_BP176677 | 320 | 321 |
| C.lanatus_DV737304 | 322 | 323 |
| C.maculosa_TA314_215693 | 324 | 325 |
| C.melo_DV634184 | 326 | 327 |
| C.obtusa_TA672_13415 | 328 | 329 |
| C.papaya_CP00062G01530 | 330 | 331 |
| C.persicum_AJ886827 | 332 | 333 |
| C.persicum_AJ887419 | 334 | 335 |
| C.richardii_BE641723 | 336 | 337 |
| C.rumphii_CB089289 | 338 | 339 |
| C.rumphii_CB091964 | 340 | 341 |
| C.rumphii_TA1592_58031 | 342 | 343 |
| C.sativus_TA1216_3659 | 344 | 345 |
| C.sinensis_CB290321 | 346 | 347 |
| C.sinensis_EY668068 | 348 | 349 |
| C.sinensis_EY672891 | 350 | 351 |
| C.sinensis_EY727333 | 352 | 353 |
| C.solstitialis_EH773123 | 354 | 355 |
| C.solstitialis_EH786461 | 356 | 357 |
| C.solstitialis_TA4017_347529 | 358 | 359 |
| C.tetragonoloba_EG985118 | 360 | 361 |
| C.tinctorius_EL398763 | 362 | 363 |
| C.tinctorius_EL406768 | 364 | 365 |
| C.tinctorius_TA2172_4222 | 366 | 367 |
| D.sophia_BU238588 | 368 | 369 |
| E.esula_DV122995 | 370 | 371 |
| E.esula_DV150176 | 372 | 373 |
| E.gracilis_s_eg003003033r | 374 | 375 |
| E.gracilis_s_eg003043031r | 376 | 377 |
| E.grandis_CD668035 | 378 | 379 |
| E.lagascae_s_el01539_t | 380 | 381 |
| E.tereticornis_CD668461 | 382 | 383 |
| E.tereticornis_CD668945 | 384 | 385 |
| E.tirucalli_BP955531 | 386 | 387 |
| F.arundinacea_DT704699 | 388 | 389 |
| F.vesca_EX687128 | 390 | 391 |
| G.hirsutum_DR458244 | 392 | 393 |
| G.hirsutum_TC155046 | 394 | 395 |
| G.max_Glyma01g38260.1 | 396 | 397 |
| G.max_Glyma04g16400.1 | 398 | 399 |
| G.max_Glyma06g46580.1 | 400 | 401 |
| G.max_Glyma11g07320.1 | 402 | 403 |
| H.annuus_AJ318325 | 404 | 405 |
| H.annuus_DY919530 | 406 | 407 |
| H.annuus_DY923448 | 408 | 409 |
| H.annuus_TC50420 | 410 | 411 |
| H.argophyllus_EE609770 | 412 | 413 |
| H.argophyllus_EE616927 | 414 | 415 |
| H.centranthoides_CB088324 | 416 | 417 |
| H.exilis_EE660703 | 418 | 419 |
| H.tuberosus_EL467266 | 420 | 421 |
| H.vulgare_AJ473991 | 422 | 423 |
| H.vulgare_HV04MC01061_62590923 | 424 | 425 |
| H.vulgare_TC157023 | 426 | 427 |
| H.vulgare_TC173149 | 428 | 429 |
| H.vulgare_TC181924 | 430 | 431 |
| Helicosporidium_CX129083 | 432 | 433 |
| I.nil_TC8501 | 434 | 435 |
| L.chinensis_CN466203 | 436 | 437 |
| L.japonicus_BP063220 | 438 | 439 |
| L.japonicus_TC39016 | 440 | 441 |
| L.japonicus_TC42407 | 442 | 443 |
| L.saligna_DW062513 | 444 | 445 |
| L.saligna_DW070628 | 446 | 447 |
| L.saligna_TA4820_75948 | 448 | 449 |
| L.serriola_DW108864 | 450 | 451 |
| L.serriola_TC4935 | 452 | 453 |
| L.temulentum_TA732_34176 | 454 | 455 |
| L.usitatissimum_61837850.f_e04_2 | 456 | 457 |
| L.usitatissimum_c61576581 | 458 | 459 |
| L.usitatissimum_LU04MC07265_61837850 | 460 | 461 |
| L.usitatissimum_LU04MC10588_62332478 | 462 | 463 |
| L.virosa_DW169559 | 464 | 465 |
| L.virosa_DW172306 | 466 | 467 |
| M.acuminata_ES437129 | 468 | 469 |
| M.acuminata_TA641_4641 | 470 | 471 |
| M.crystallinum_BE034710 | 472 | 473 |
| M.crystallinum_BF479478 | 474 | 475 |
| M.domestica_TC40305 | 476 | 477 |
| M.esculenta_DV449414 | 478 | 479 |
| M.piperita_AW255467 | 480 | 481 |
| M.polymorpha_BJ867244 | 482 | 483 |
| M.sieboldii_CN915468 | 484 | 485 |
| M.truncatula_AC135566_19.5 | 486 | 487 |
| N.advena_CD474178 | 488 | 489 |
| N.benthamiana_TC16460 | 490 | 491 |
| N.nucifera_EH613403 | 492 | 493 |
| N.sylvestris_BP745520 | 494 | 495 |
| N.tabacum_TC51197 | 496 | 497 |
| N.tabacum_TC59871 | 498 | 499 |
| N.tabacum_TC76332 | 500 | 501 |
| Nicotiana_langsdorffii_x_sanderae_TA262_164110 | 502 | 503 |
| O.glaberrima_Og010279.01 | 504 | 505 |
| O.sativa_LOC_Os03g05700.1 | 506 | 507 |
| O.sativa_LOC_Os03g51470.1 | 508 | 509 |
| S.cereale_BQ160374 | 510 | 511 |
| O.sativa_LOC_Os08g10400.1 | 512 | 513 |
| O.sativa_LOC_Os10g40824.1 | 514 | 515 |
| P.americana_CV002279 | 516 | 517 |
| P.armeniaca_TA3954_36596 | 518 | 519 |
| P.axillaris_TA164_33119 | 520 | 521 |
| P.canadensis_CX183847 | 522 | 523 |
| P.cerasus_EE488481 | 524 | 525 |
| P.coccineus_CA911820 | 526 | 527 |
| P.dulcis_BU573498 | 528 | 529 |
| P.dulcis_BU574572 | 530 | 531 |
| P.equestris_CB033634 | 532 | 533 |
| P.euphratica_AJ773453 | 534 | 535 |
| P.ginseng_DV556099 | 536 | 537 |
| P.ginseng_DV556139 | 538 | 539 |
| P.glauca_CO479030 | 540 | 541 |
| P.glaucum_EB410943 | 542 | 543 |
| P.hybrida_TC1584 | 544 | 545 |
| P.menziesii_ES421929 | 546 | 547 |
| P.patens_TC54724 | 548 | 549 |
| P.pinaster_TA3303_71647 | 550 | 551 |
| P.sitchensis_TA13290_3332 | 552 | 553 |
| P.taeda_TA15984_3352 | 554 | 555 |
| P.tenuiflora_CN487508 | 556 | 557 |
| P.tremula_TA10333_113636 | 558 | 559 |
| P.tremula_TA7771_113636 | 560 | 561 |
| P.tremula_TA7772_113636 | 562 | 563 |
| P.trichocarpa_585933 | 564 | 565 |
| P.trichocarpa_643359 | 566 | 567 |
| P.trichocarpa_831254 | 568 | 569 |
| P.tricornutum_34756 | 570 | 571 |
| P.tricornutum_35319 | 572 | 573 |
| P.tricornutum_45377 | 574 | 575 |
| P.trifoliata_CX640083 | 576 | 577 |
| P.virgatum_FL844915 | 578 | 579 |
| P.virgatum_GD012331 | 580 | 581 |
| P.virgatum_TC15762 | 582 | 583 |
| P.virgatum_TC18672 | 584 | 585 |
| P.virgatum_TC19371 | 586 | 587 |
| P.virgatum_TC21333 | 588 | 589 |
| P.virgatum_TC35301 | 590 | 591 |
| P.virgatum_TC45394 | 592 | 593 |
| P.virgatum_TC49042 | 594 | 595 |
| P.vulgaris_TC16757 | 596 | 597 |
| P.wickerhamii_TA800_3111 | 598 | 599 |
| P.zeylanica_CB817807 | 600 | 601 |
| R.chinensis_BI978170 | 602 | 603 |
| R.chinensis_BI978786 | 604 | 605 |
| R.chinensis_TA261_74649 | 606 | 607 |
| R.hybrid_BQ104489 | 608 | 609 |
| S.alterniflora_EH277022 | 610 | 611 |
| S.alterniflora_EH277475 | 612 | 613 |
| S.bicolor_Sb01g009650.1 | 614 | 615 |
| S.bicolor_Sb01g009660.1 | 616 | 617 |
| S.bicolor_Sb01g029160.1 | 618 | 619 |
| S.bicolor_Sb01g035820.1 | 620 | 621 |
| S.henryi_DT591892 | 622 | 623 |
| S.hybrid_CF574777 | 624 | 625 |
| S.lycopersicum_DB694810 | 626 | 627 |
| S.lycopersicum_TC200119 | 628 | 629 |
| S.officinarum_CA100293 | 630 | 631 |
| S.officinarum_CA142694 | 632 | 633 |
| S.officinarum_CA202822 | 634 | 635 |
| S.officinarum_TC78965 | 636 | 637 |
| S.officinarum_TC81273 | 638 | 639 |
| S.salsa_AW982145 | 640 | 641 |
| S.tuberosum_TC181351 | 642 | 643 |
| T.aestivum_CA603660 | 644 | 645 |
| T.aestivum_CK151611 | 646 | 647 |
| T.aestivum_TA06MC03363_54495378 | 648 | 649 |
| T.aestivum_TA06MC09026_55236832 | 650 | 651 |
| T.aestivum_TC299614 | 652 | 653 |
| T.aestivum_TC300853 | 654 | 655 |
| T.aestivum_TC305290 | 656 | 657 |
| T.aestivum_TC307541 | 658 | 659 |
| T.aestivum_TC307720 | 660 | 661 |
| T.aestivum_TC311647 | 662 | 663 |
| T.aestivum_TC313329 | 664 | 665 |
| T.aestivum_TC335317 | 666 | 667 |
| T.androssowii_TA2143_189785 | 668 | 669 |
| T.erecta_SIN_01b-CS_Scarletade-9-C16.b1 | 670 | 671 |
| T.kok-saghyz_DR401105 | 672 | 673 |
| T.kok-saghyz_DR401469 | 674 | 675 |
| T.monococcum_BE492863 | 676 | 677 |
| T.monococcum_BQ802764 | 678 | 679 |
| T.officinale_DY838884 | 680 | 681 |
| T.officinale_DY839222 | 682 | 683 |
| T.officinale_TA1556_50225 | 684 | 685 |
| T.pseudonana_25031 | 686 | 687 |
| T.ruralis_CN200805 | 688 | 689 |
| T.versicolor_EY020157 | 690 | 691 |
| Triphysaria_sp_EY135750 | 692 | 693 |
| Triphysaria_sp_EY140347 | 694 | 695 |
| Triphysaria_sp_TC10995 | 696 | 697 |
| V.arizonica_x_rupestris_DN943112 | 698 | 699 |
| V.corymbosum_CV190443 | 700 | 701 |
| V.vinifera_GSVIVT00036379001 | 702 | 703 |
| Y.filamentosa_DT598701 | 704 | 705 |
| Z.aethiopica_TA1222_69721 | 706 | 707 |
| Z.elegans_AU288933 | 708 | 709 |
| Z.mays_AI649427 | 710 | 711 |
| Z.mays_FL334597 | 712 | 713 |
| Z.mays_TC477409 | 714 | 715 |
| Z.mays_TC479072 | 716 | 717 |
| Z.mays_TC486459 | 718 | 719 |
| Z.mays_TC487740 | 720 | 721 |
| Z.mays_TC490320 | 722 | 723 |
| Z.mays_TC502630 | 724 | 725 |
| Z.mays_TC506050 | 726 | 727 |
| Z.mays_TC514541 | 728 | 729 |
| Z.mays_TC522093 | 730 | 731 |
| Z.mays_TC522166 | 732 | 733 |
| Z.mays_TC535140 | 734 | 735 |
| Z.mays_ZM07MSbpsHQ_57582449.r01 | 736 | 737 |
| Z.officinale_TA5715_94328 | 738 | 739 |

[0642] Sequences have been tentatively assembled and publicly disclosed by research institutions, such as The Institute for Genomic Research (TIGR; beginning with TA). For instance, the Eukaryotic Gene Orthologs (EGO) database may be used to identify such related sequences, either by keyword search or by using the BLAST algorithm with the nucleic acid sequence or polypeptide sequence of interest. Special nucleic acid sequence databases have been created for particular organisms, e.g. for certain prokaryotic organisms, such as by the Joint Genome Institute. Furthermore, access to proprietary databases, has allowed the identification of novel nucleic acid and polypeptide sequences.

### Example 13

### Alignment of GRP Polypeptide Sequences

[0643] Alignment of a number of polypeptide sequences was performed using the ClustalW (1.8) algorithm of progressive alignment (Thompson et al. (1997) Nucleic Acids Res 25:4876-4882; Chenna et al. (2003). Nucleic Acids Res 31:3497-3500) with standard setting (slow alignment, similarity matrix: Gonnet, gap opening penalty 10, gap extension penalty: 0.2). Minor manual editing was done to further optimise the alignment. These polypeptides are aligned in FIG. 7.

### Example 14

### Calculation of Global Percentage Identity Between Polypeptide Sequences

[0644] Global percentages of similarity and identity between full length polypeptide sequences useful in performing the methods of the invention were determined using one of the methods available in the art, the MatGAT (Matrix Global Alignment Tool) software (BMC Bioinformatics. 2003 4:29. MatGAT: an application that generates similarity/identity matrices using protein or DNA sequences. Campanella J J, Bitincka L, Smalley J; software hosted by Ledion Bitincka). MatGAT software generates similarity/identity matrices for DNA or protein sequences without needing pre-alignment of the data. The program performs a series of pair-wise alignments using the Myers and Miller global alignment algorithm (with a gap opening penalty of 12, and a gap extension penalty of 2), calculates similarity and identity using for example Blosum 62 (for polypeptides), and then places the results in a distance matrix.

[0645] Results of the software analysis are shown in FIG. 8 for the global similarity and identity over the full length of a representative list of polypeptide sequences. Sequence similarity is shown in the bottom half of the dividing line and sequence identity is shown in the top half of the diagonal dividing line. Parameters used in the comparison were: Scoring matrix: Blosum62, First Gap: 12, Extending Gap: 2. The sequence identity (in %) between the polypeptide sequences useful in performing the methods of the invention is generally higher than 20%) compared to SEQ ID NO: 251.

### Example 15

### Topology Prediction of a Polypeptide Sequences According to the Invention

[0646] TargetP 1.1 predicts the subcellular location of eukaryotic proteins. The location assignment is based on the predicted presence of any of the N-terminal pre-sequences: chloroplast transit peptide (cTP), mitochondrial targeting peptide (mTP) or secretory pathway signal peptide (SP). Scores on which the final prediction is based are not really probabilities, and they do not necessarily add to one. However, the location with the highest score is the most likely according to TargetP, and the relationship between the scores (the reliability class) may be an indication of how certain the prediction is. The reliability class (RC) ranges from 1 to 5, where 1 indicates the strongest prediction. TargetP is maintained at the server of the Technical University of Denmark.

[0647] For the sequences predicted to contain an N-terminal presequence a potential cleavage site can also be predicted.

[0648] A number of parameters can be selected, such as organism group (non-plant or plant), cutoff sets (none, predefined set of cutoffs, or user-specified set of cutoffs), and the calculation of prediction of cleavage sites (yes or no). In the present case, the “plant” organism group has been selected, no cutoffs defined, and the predicted length of the transit peptide requested. The results of TargetP 1.1 analysis of the polypeptide sequence as represented by SEQ ID NO: 251 are presented Table G.

TABLE G
TargetP 1.1 analysis of the polypeptide sequence as represented by SEQ ID NO:
2. Abbreviations: Len, Length; cTP, Chloroplastic transit peptide; mTP, Mitochondrial
transit peptide, SP, Secretory pathway signal peptide, other, Other subcellular targeting,
Loc, Predicted Location; RC, Reliability class; TPlen, Predicted transit peptide length.

| Name | Len | cTP | mTP | SP | other | Loc | RC | TPlen |
|---|---|---|---|---|---|---|---|---|
| Sequence | 95 | 0.549 | 0.095 | 0.116 | 0.519 | C | 5 | 23 |
| cutoff | | 0.000 | 0.000 | 0.000 | 0.000 | | | |

[0649] Many other algorithms can be used to perform such analyses, including:
[0650] ChloroP 1.1 hosted on the server of the Technical University of Denmark;
[0651] Protein Prowler Subcellular Localisation Predictor version 1.2 hosted on the server of the Institute for Molecular Bioscience, University of Queensland, Brisbane, Australia;
[0652] PENCE Proteome Analyst PA-GOSUB 2.5 hosted on the server of the University of Alberta, Edmonton, Alberta, Canada;
[0653] TMHMM, hosted on the server of the Technical University of Denmark
[0654] PSORT (URL: psort.org)
[0655] PLOC (Park and Kanehisa, Bioinformatics, 19, 1656-1663, 2003).

[0656] Results of the PSORT algorithm given in Table H indicate for instance the following:

TABLE H

| | |
|---|---|
| chloroplast thylakoid space | Certainty = 0.950(Affirmative) < succ> |
| chloroplast stroma | Certainty = 0.727(Affirmative) < succ> |
| Chloroplast thylakoid membrane | Certainty = 0.504(Affirmative) < succ> |

### Example 16

### Cloning of a Nucleic Acid Sequence Encoding a GRP According to the Invention

[0657] The nucleic acid sequence was amplified by PCR using as template a custom-made Oryza sativa seedlings cDNA library. PCR was performed using Hifi Taq DNA polymerase in standard conditions, using 200 ng of template in a 50 μl PCR mix. The primers used were prm14300 (SEQ ID NO: 740; sense): 5′-ggggacaagtttgtacaaaaaagcaggcttaaacaatggaat ccattaagacacaa-3′; and prm14301 (SEQ ID NO: 741; reverse, complementary): 5′-ggggaccactttgtacaagaaagctgggtcagaaggcaaacaagctg-3′, which include the AttB sites for Gateway recombination. The amplified PCR fragment was purified also using standard methods. The first step of the Gateway procedure, the BP reaction, was then performed, during which the PCR fragment recombined in vivo with the pDONR201 plasmid to produce, according to the Gateway terminology, an “entry clone”, pGRP. Plasmid pDONR201 was purchased from Invitrogen, as part of the Gateway® technology. The entry clone comprising SEQ ID NO: 250 was then used in an LR reaction with a destination vector used for Oryza sativa transformation. This vector contained as functional elements within the T-DNA borders: a plant selectable marker; a screenable marker expression cassette; and a Gateway cassette intended for LR in vivo recombination with the nucleic acid sequence of interest already cloned in the entry clone. A rice GOS2 promoter (SEQ ID NO: 744) for constitutive specific expression was located upstream of this Gateway cassette. After the LR recombination step, the resulting expression vector pGOS2::GRP (FIG. 9) was transformed into Agrobacterium strain LBA4044 according to methods well known in the art.

### Example 17

### Plant Transformation

### Rice Transformation

[0658] The Agrobacterium containing the expression vector was used to transform Oryza sativa plants. Mature dry seeds of the rice japonica cultivar Nipponbare were dehusked. Sterilization was carried out by incubating for one minute in 70% ethanol, followed by 30 minutes in 0.2% HgCl₂, followed by a 6 times 15 minutes wash with sterile distilled water. The sterile seeds were then germinated on a medium containing 2,4-D (callus induction medium). After incubation in the dark for four weeks, embryogenic, scutellum-derived calli were excised and propagated on the same medium. After two weeks, the calli were multiplied or propagated by subculture on the same medium for another 2 weeks. Embryogenic callus pieces were sub-cultured on fresh medium 3 days before co-cultivation (to boost cell division activity).

[0659] Agrobacterium strain LBA4404 containing the expression vector was used for co-cultivation. Agrobacterium was inoculated on AB medium with the appropriate antibiotics and cultured for 3 days at 28° C. The bacteria were then collected and suspended in liquid co-cultivation medium to a density (OD₆₀₀) of about 1. The suspension was then transferred to a Petri dish and the calli immersed in the suspension for 15 minutes. The callus tissues were then blotted dry on a filter paper and transferred to solidified, co-cultivation medium and incubated for 3 days in the dark at 25° C. Co-cultivated calli were grown on 2,4-D-containing medium for 4 weeks in the dark at 28° C. in the presence of a selection agent. During this period, rapidly growing resistant callus islands developed. After transfer of this material to a regeneration medium and incubation in the light, the embryogenic potential was released and shoots developed in the next four to five weeks. Shoots were excised from the calli and incubated for 2 to 3 weeks on an auxin-containing medium from which they were transferred to soil. Hardened shoots were grown under high humidity and short days in a greenhouse.

[0660] Approximately 35 independent T0 rice transformants were generated for one construct. The primary transformants were transferred from a tissue culture chamber to a greenhouse. After a quantitative PCR analysis to verify copy number of the T-DNA insert, only single copy transgenic plants that exhibit tolerance to the selection agent were kept for harvest of T1 seed. Seeds were then harvested three to five months after transplanting. The method yielded single locus transformants at a rate of over 50% (Aldemita and Hodges 1996, Chan et al. 1993, Hiei et al. 1994).

### Example 18

### Transformation of Other Crops

### Corn Transformation

[0661] Transformation of maize (Zea mays) is performed with a modification of the method described by Ishida et al. (1996) Nature Biotech 14(6): 745-50. Transformation is genotype-dependent in corn and only specific genotypes are amenable to transformation and regeneration. The inbred line A188 (University of Minnesota) or hybrids with A188 as a parent are good sources of donor material for transformation, but other genotypes can be used successfully as well. Ears are harvested from corn plant approximately 11 days after pollination (DAP) when the length of the immature embryo is about 1 to 1.2 mm. Immature embryos are cocultivated with Agrobacterium tumefaciens containing the expression vector, and transgenic plants are recovered through organogenesis. Excised embryos are grown on callus induction medium, then maize regeneration medium, containing the selection agent (for example imidazolinone but various selection markers can be used). The Petri plates are incubated in the light at 25° C. for 2-3 weeks, or until shoots develop. The green shoots are transferred from each embryo to maize rooting medium and incubated at 25° C. for 2-3 weeks, until roots develop. The rooted shoots are transplanted to soil in the greenhouse. T1 seeds are produced from plants that exhibit tolerance to the selection agent and that contain a single copy of the T-DNA insert.

### Wheat Transformation

[0662] Transformation of wheat is performed with the method described by Ishida et al. (1996) Nature Biotech 14(6): 745-50. The cultivar Bobwhite (available from CIMMYT, Mexico) is commonly used in transformation. Immature embryos are co-cultivated with Agrobacterium tumefaciens containing the expression vector, and transgenic plants are recovered through organogenesis. After incubation with Agrobacterium, the embryos are grown in vitro on callus induction medium, then regeneration medium, containing the selection agent (for example imidazolinone but various selection markers can be used). The Petri plates are incubated in the light at 25° C. for 2-3 weeks, or until shoots develop. The green shoots are transferred from each embryo to rooting medium and incubated at 25° C. for 2-3 weeks, until roots develop. The rooted shoots are transplanted to soil in the greenhouse. T1 seeds are produced from plants that exhibit tolerance to the selection agent and that contain a single copy of the T-DNA insert.

### Soybean Transformation

[0663] Soybean is transformed according to a modification of the method described in the Texas A&M patent U.S. Pat. No. 5,164,310. Several commercial soybean varieties are amenable to transformation by this method. The cultivar Jack (available from the Illinois Seed foundation) is commonly used for transformation. Soybean seeds are sterilised for in vitro sowing. The hypocotyl, the radicle and one cotyledon are excised from seven-day old young seedlings. The epicotyl and the remaining cotyledon are further grown to develop axillary nodes. These axillary nodes are excised and incubated with Agrobacterium tumefaciens containing the expression vector. After the cocultivation treatment, the explants are washed and transferred to selection media. Regenerated shoots are excised and placed on a shoot elongation medium. Shoots no longer than 1 cm are placed on rooting medium until roots develop. The rooted shoots are transplanted to soil in the greenhouse. T1 seeds are produced from plants that exhibit tolerance to the selection agent and that contain a single copy of the T-DNA insert.

### Rapeseed/Canola Transformation

[0664] Cotyledonary petioles and hypocotyls of 5-6 day old young seedling are used as explants for tissue culture and transformed according to Babic et al. (1998, Plant Cell Rep 17: 183-188). The commercial cultivar Westar (Agriculture Canada) is the standard variety used for transformation, but other varieties can also be used. Canola seeds are surface-sterilized for in vitro sowing. The cotyledon petiole explants with the cotyledon attached are excised from the in vitro seedlings, and inoculated with Agrobacterium (containing the expression vector) by dipping the cut end of the petiole explant into the bacterial suspension. The explants are then cultured for 2 days on MSBAP-3 medium containing 3 mg/l BAP, 3% sucrose, 0.7% Phytagar at 23° C., 16 hr light. After two days of co-cultivation with Agrobacterium, the petiole explants are transferred to MSBAP-3 medium containing 3 mg/l BAP, cefotaxime, carbenicillin, or timentin (300 mg/l) for 7 days, and then cultured on MSBAP-3 medium with cefotaxime, carbenicillin, or timentin and selection agent until shoot regeneration. When the shoots are 5-10 mm in length, they are cut and transferred to shoot elongation medium (MSBAP-0.5, containing 0.5 mg/l BAP). Shoots of about 2 cm in length are transferred to the rooting medium (MS0) for root induction. The rooted shoots are transplanted to soil in the greenhouse. T1 seeds are produced from plants that exhibit tolerance to the selection agent and that contain a single copy of the T-DNA insert.

### Alfalfa Transformation

[0665] A regenerating clone of alfalfa (Medicago sativa) is transformed using the method of (McKersie et al., 1999 Plant Physiol 119: 839-847). Regeneration and transformation of alfalfa is genotype dependent and therefore a regenerating plant is required. Methods to obtain regenerating plants have been described. For example, these can be selected from the cultivar Rangelander (Agriculture Canada) or any other commercial alfalfa variety as described by Brown D C W and A Atanassov (1985. Plant Cell Tissue Organ Culture 4: 111-112). Alternatively, the RA3 variety (University of Wisconsin) has been selected for use in tissue culture (Walker et al., 1978 Am J Bot 65:654-659). Petiole explants are cocultivated with an overnight culture of Agrobacterium tumefaciens C58C1 pMP90 (McKersie et al., 1999 Plant Physiol 119: 839-847) or LBA4404 containing the expression vector. The explants are cocultivated for 3 d in the dark on SH induction medium containing 288 mg/L Pro, 53 mg/L thioproline, 4.35 g/L K2SO4, and 100 μm acetosyringinone. The explants are washed in half-strength Murashige-Skoog medium (Murashige and Skoog, 1962) and plated on the same SH induction medium without acetosyringinone but with a suitable selection agent and suitable antibiotic to inhibit Agrobacterium growth. After several weeks, somatic embryos are transferred to BOi2Y development medium containing no growth regulators, no antibiotics, and 50 g/L sucrose. Somatic embryos are subsequently germinated on half-strength Murashige-Skoog medium. Rooted seedlings were transplanted into pots and grown in a greenhouse. T1 seeds are produced from plants that exhibit tolerance to the selection agent and that contain a single copy of the T-DNA insert.

### Cotton Transformation

[0666] Cotton is transformed using Agrobacterium tumefaciens according to the method described in U.S. Pat. No. 5,159,135. Cotton seeds are surface sterilised in 3% sodium hypochlorite solution during 20 minutes and washed in distilled water with 500 μg/ml cefotaxime. The seeds are then transferred to SH-medium with 50 μg/ml benomyl for germination. Hypocotyls of 4 to 6 days old seedlings are removed, cut into 0.5 cm pieces and are placed on 0.8% agar. An Agrobacterium suspension (approx. 108 cells per ml, diluted from an overnight culture transformed with the gene of interest and suitable selection markers) is used for inoculation of the hypocotyl explants. After 3 days at room temperature and lighting, the tissues are transferred to a solid medium (1.6 g/l Gelrite) with Murashige and Skoog salts with B5 vitamins (Gamborg et al., Exp. Cell Res. 50:151-158 (1968)), 0.1 mg/l 2,4-D, 0.1 mg/l 6-furfurylaminopurine and 750 μg/ml MgCL2, and with 50 to 100 μg/ml cefotaxime and 400-500 μg/ml carbenicillin to kill residual bacteria. Individual cell lines are isolated after two to three months (with subcultures every four to six weeks) and are further cultivated on selective medium for tissue amplification (30° C., 16 hr photoperiod). Transformed tissues are subsequently further cultivated on non-selective medium during 2 to 3 months to give rise to somatic embryos. Healthy looking embryos of at least 4 mm length are transferred to tubes with SH medium in fine vermiculite, supplemented with 0.1 mg/l indole acetic acid, 6 furfurylaminopurine and gibberellic acid. The embryos are cultivated at 30° C. with a photoperiod of 16 hrs, and plantlets at the 2 to 3 leaf stage are transferred to pots with vermiculite and nutrients. The plants are hardened and subsequently moved to the greenhouse for further cultivation.

### Sugarbeet Transformation

[0667] Seeds of sugarbeet (Beta vulgaris L.) are sterilized in 70% ethanol for one minute followed by 20 min. shaking in 20% Hypochlorite bleach e.g. Clorox® regular bleach (commercially available from Clorox, 1221 Broadway, Oakland, Calif. 94612, USA). Seeds are rinsed with sterile water and air dried followed by plating onto germinating medium (Murashige and Skoog (MS) based medium (Murashige, T., and Skoog, 1962. Physiol. Plant, vol. 15, 473-497) including B5 vitamins (Gamborg et al.; Exp. Cell Res., vol. 50, 151-8.) supplemented with 10 g/l sucrose and 0.8% agar). Hypocotyl tissue is used essentially for the initiation of shoot cultures according to Hussey and Hepher (Hussey, G., and Hepher, A., 1978. Annals of Botany, 42, 477-9) and are maintained on MS based medium supplemented with 30 g/l sucrose plus 0.25 mg/l benzylamino purine and 0.75% agar, pH 5.8 at 23-25° C. with a 16-hour photoperiod. Agrobacterium tumefaciens strain carrying a binary plasmid harbouring a selectable marker gene, for example nptII, is used in transformation experiments. One day before transformation, a liquid LB culture including antibiotics is grown on a shaker (28° C., 150 rpm) until an optical density (O.D.) at 600 nm of ˜1 is reached. Overnight-grown bacterial cultures are centrifuged and resuspended in inoculation medium (O.D. ˜1) including Acetosyringone, pH 5.5. Shoot base tissue is cut into slices (1.0 cm×1.0 cm×2.0 mm approximately). Tissue is immersed for 30 s in liquid bacterial inoculation medium. Excess liquid is removed by filter paper blotting. Co-cultivation occurred for 24-72 hours on MS based medium incl. 30 g/l sucrose followed by a non-selective period including MS based medium, 30 g/l sucrose with 1 mg/l BAP to induce shoot development and cefotaxim for eliminating the Agrobacterium. After 3-10 days explants are transferred to similar selective medium harbouring for example kanamycin or G418 (50-100 mg/l genotype dependent). Tissues are transferred to fresh medium every 2-3 weeks to maintain selection pressure. The very rapid initiation of shoots (after 3-4 days) indicates regeneration of existing meristems rather than organogenesis of newly developed transgenic meristems. Small shoots are transferred after several rounds of subculture to root induction medium containing 5 mg/l NAA and kanamycin or G418. Additional steps are taken to reduce the potential of generating transformed plants that are chimeric (partially transgenic). Tissue samples from regenerated shoots are used for DNA analysis. Other transformation methods for sugarbeet are known in the art, for example those by Linsey & Gallois (Linsey, K., and Gallois, P., 1990. Journal of Experimental Botany; vol. 41, No. 226; 529-36) or the methods published in the international application published as WO9623891A.

### Sugarcane Transformation

[0668] Spindles are isolated from 6-month-old field grown sugarcane plants (see Arencibia et al., 1998. Transgenic Research, vol. 7, 213-22; Enriquez-Obregon et al., 1998. Planta, vol. 206, 20-27). Material is sterilized by immersion in a 20% Hypochlorite bleach e.g. Clorox® regular bleach (commercially available from Clorox, 1221 Broadway, Oakland, Calif. 94612, USA) for 20 minutes. Transverse sections around 0.5 cm are placed on the medium in the top-up direction. Plant material is cultivated for 4 weeks on MS (Murashige, T., and Skoog, 1962. Physiol. Plant, vol. 15, 473-497) based medium incl. B5 vitamins (Gamborg, O., et al., 1968. Exp. Cell Res., vol. 50, 151-8) supplemented with 20 g/l sucrose, 500 mg/l casein hydrolysate, 0.8% agar and 5 mg/l 2,4-D at 23° C. in the dark. Cultures are transferred after 4 weeks onto identical fresh medium. Agrobacterium tumefaciens strain carrying a binary plasmid harbouring a selectable marker gene, for example hpt, is used in transformation experiments. One day before transformation, a liquid LB culture including antibiotics is grown on a shaker (28° C., 150 rpm) until an optical density (O.D.) at 600 nm of ˜0.6 is reached. Overnight-grown bacterial cultures are centrifuged and resuspended in MS based inoculation medium (O.D. ˜0.4) including acetosyringone, pH 5.5. Sugarcane embryogenic callus pieces (2-4 mm) are isolated based on morphological characteristics as compact structure and yellow colour and dried for 20 min. in the flow hood followed by immersion in a liquid bacterial inoculation medium for 10-20 minutes. Excess liquid is removed by filter paper blotting. Co-cultivation occurred for 3-5 days in the dark on filter paper which is placed on top of MS based medium incl. B5 vitamins containing 1 mg/l 2,4-D. After co-cultivation calli are washed with sterile water followed by a non-selective cultivation period on similar medium containing 500 mg/l cefotaxime for eliminating remaining Agrobacterium cells. After 3-10 days explants are transferred to MS based selective medium incl. B5 vitamins containing 1 mg/l 2,4-D for another 3 weeks harbouring 25 mg/l of hygromycin (genotype dependent). All treatments are made at 23° C. under dark conditions. Resistant calli are further cultivated on medium lacking 2,4-D including 1 mg/l BA and 25 mg/l hygromycin under 16 h light photoperiod resulting in the development of shoot structures.

[0669] Shoots are isolated and cultivated on selective rooting medium (MS based including, 20 g/l sucrose, 20 mg/l hygromycin and 500 mg/l cefotaxime). Tissue samples from regenerated shoots are used for DNA analysis. Other transformation methods for sugarcane are known in the art, for example from the in-ternational application published as WO2010/151634A and the granted European patent EP1831378.

### Example 19

### Phenotypic Evaluation Procedure

### 19.1 Evaluation Setup

[0670] Approximately 35 independent T0 rice transformants were generated. The primary transformants were transferred from a tissue culture chamber to a greenhouse for growing and harvest of T1 seed. Six events, of which the T1 progeny segregated 3:1 for presence/absence of the transgene, were retained. For each of these events, approximately 10 T1 seedlings containing the transgene (hetero- and homo-zygotes) and approximately 10 T1 seedlings lacking the transgene (nullizygotes) were selected by monitoring visual marker expression. The transgenic plants and the corresponding nullizygotes were grown side-by-side at random positions. Greenhouse conditions were of shorts days (12 hours light), 28° C. in the light and 22° C. in the dark, and a relative humidity of 70%. Plants grown under non-stress conditions were watered at regular intervals to ensure that water and nutrients were not limiting and to satisfy plant needs to complete growth and development.

[0671] From the stage of sowing until the stage of maturity the plants were passed several times through a digital imaging cabinet. At each time point digital images (2048×1536 pixels, 16 million colours) were taken of each plant from at least 6 different angles.

[0672] T1 events can be further evaluated in the T2 generation following the same evaluation procedure as for the T1 generation, e.g. with less events and/or with more individuals per event.

### Drought Screen

[0673] Plants from T2 seeds are grown in potting soil under normal conditions until they approached the heading stage. They are then transferred to a “dry” section where irrigation is withheld. Humidity probes are inserted in randomly chosen pots to monitor the soil water content (SWC). When SWC goes below certain thresholds, the plants are automatically re-watered continuously until a normal level is reached again. The plants are then re-transferred again to normal conditions. The rest of the cultivation (plant maturation, seed harvest) is the same as for plants not grown under abiotic stress conditions. Growth and yield parameters are recorded as detailed for growth under normal conditions.

### Nitrogen Use Efficiency Screen

[0674] Rice plants from T2 seeds are grown in potting soil under normal conditions except for the nutrient solution. The pots are watered from transplantation to maturation with a specific nutrient solution containing reduced N nitrogen (N) content, usually between 7 to 8 times less. The rest of the cultivation (plant maturation, seed harvest) is the same as for plants not grown under abiotic stress. Growth and yield parameters are recorded as detailed for growth under normal conditions.

### Salt Stress Screen

[0675] Plants are grown on a substrate made of coco fibers and argex (3 to 1 ratio). A normal nutrient solution is used during the first two weeks after transplanting the plantlets in the greenhouse. After the first two weeks, 25 mM of salt (NaCl) is added to the nutrient solution, until the plants are harvested. Seed-related parameters are then measured.

### 19.2 Statistical Analysis: F Test

[0676] A two factor ANOVA (analysis of variants) was used as a statistical model for the overall evaluation of plant phenotypic characteristics. An F test was carried out on all the parameters measured of all the plants of all the events transformed with the gene of the present invention. The F test was carried out to check for an effect of the gene over all the transformation events and to verify for an overall effect of the gene, also known as a global gene effect. The threshold for significance for a true global gene effect was set at a 5% probability level for the F test. A significant F test value points to a gene effect, meaning that it is not only the mere presence or position of the gene that is causing the differences in phenotype.

### 19.3 Parameters Measured

[0677] From the stage of sowing until the stage of maturity the plants were passed several times through a digital imaging cabinet. At each time point digital images (2048×1536 pixels, 16 million colours) were taken of each plant from at least 6 different angles as described in WO2010/031780. These measurements were used to determine different parameters.

### Biomass-Related Parameter Measurement

[0678] The plant aboveground area, also named leafy biomass, was determined by counting the total number of pixels on the digital images from aboveground plant parts discriminated from the background. This value was averaged for the pictures taken on the same time point from the different angles and was converted to a physical surface value expressed in square mm by calibration. Experiments show that the aboveground plant area measured this way correlates with the biomass of plant parts above ground. The above ground area is the area measured at the time point at which the plant had reached its maximal leafy biomass.

[0679] Increase in root biomass can be expressed as an increase in total root biomass (measured as maximum biomass of roots observed during the lifespan of a plant); or as an increase in the root/shoot index (measured as the ratio between root mass and shoot mass in the period of active growth of root and shoot). Root biomass can be determined using a method as described in WO 2006/029987.

### Parameters Related to Development Time

[0680] The early vigour is the plant (seedling) aboveground area three weeks post-germination. Early vigour was determined by counting the total number of pixels from aboveground plant parts discriminated from the background. This value was averaged for the pictures taken on the same time point from different angles and was converted to a physical surface value expressed in square mm by calibration.

[0681] The “flowering time” of a plant can be determined using the method as described in WO 2007/093444.

### Seed-Related Parameter Measurements

[0682] The mature primary panicles were harvested, counted, bagged, barcode-labelled and then dried for three days in an oven at 37° C. The panicles were then threshed and all the seeds were collected and counted. The filled husks were separated from the empty ones using an air-blowing device. The empty husks were discarded and the remaining fraction was counted again. The filled husks were weighed on an analytical balance. The number of filled seeds was determined by counting the number of filled husks that remained after the separation step. The total seed yield was measured by weighing all filled husks harvested from a plant. Total seed number per plant was measured by counting the number of husks harvested from a plant. Thousand Kernel Weight (TKW) is extrapolated from the number of filled seeds counted and their total weight. The Harvest Index (HI) in the present invention is defined as the ratio between the total seed yield and the above ground area (mm²), multiplied by a factor 10⁶. The total number of flowers per panicle as defined in the present invention is the ratio between the total number of seeds and the number of mature primary panicles. The seed fill rate as defined in the present invention is the proportion (expressed as a %) of the number of filled seeds over the total number of seeds (or florets).

### Example 20

### Results of the Phenotypic Evaluation of the Transgenic Plants

[0683] The results of the evaluation of transgenic rice plants in the T1 generation and expressing a nucleic acid encoding the polypeptide of SEQ ID NO: 251 under non-stress conditions are presented below in Table I. When grown under non-stress conditions, an increase of 5% or more was observed for parameters related to increased aboveground biomass.

[0684] In addition, when grown under non-stress conditions, an increase of 5% or more was also observed for parameters related to seed yield including total weight of the seeds, thousand kernel weight (TKW), number of filled seeds, number of flowers per panicle, and harvest index.

TABLE I
Data summary for transgenic rice plants; for each parameter,
the overall percent increase is shown for the T1 generation
of plants, for each parameter the p-value is <0.05.

| Parameter | Overall increase |
|---|---|
| totalwgseeds | 19.1 |
| harvestindex | 17.8 |
| nrfilledseed | 15.0 |
| flowerperpan | 17.1 |
| TKW | 5.0 |
| HeightMax | 7.6 |
| GravityYMax | 6.8 |

### Example 21

### Identification of Sequences Related to SEQ ID NO: 746 and SEQ ID NO: 747

[0685] Sequences (full length cDNA, ESTs or genomic) related to SEQ ID NO: 746 and SEQ ID NO: 747 were identified amongst those maintained in the Entrez Nucleotides database at the National Center for Biotechnology Information (NCBI) using database sequence search tools, such as the Basic Local Alignment Tool (BLAST) (Altschul et al. (1990) J. Mol. Biol. 215:403-410; and Altschul et al. (1997) Nucleic Acids Res. 25:3389-3402). The program is used to find regions of local similarity between sequences by comparing nucleic acid or polypeptide sequences to sequence databases and by calculating the statistical significance of matches. For example, the polypeptide encoded by the nucleic acid of SEQ ID NO: 746 was used for the TBLASTN algorithm, with default settings and the filter to ignore low complexity sequences set off. The output of the analysis was viewed by pairwise comparison, and ranked according to the probability score (E-value), where the score reflect the probability that a particular alignment occurs by chance (the lower the E-value, the more significant the hit). In addition to E-values, comparisons were also scored by percentage identity. Percentage identity refers to the number of identical nucleotides (or amino acids) between the two compared nucleic acid (or polypeptide) sequences over a particular length. In some instances, the default parameters may be adjusted to modify the stringency of the search. For example the E-value may be increased to show less stringent matches. This way, short nearly exact matches may be identified.

[0686] Table J refers to SEQ ID NO: 746 and SEQ ID NO: 747 and provides a list of nucleic acid sequences related to SEQ ID NO: 746 and SEQ ID NO: 747.

TABLE J
Examples of ZPR nucleic acids and polypeptides

| | Nucleic | |
|---|---|---|
| | acid | Protein |
| | SEQ ID | SEQ ID |
| Plant Source | NO: | NO: |
| S.lycopersicum_TC205388#1 | 746 | 747 |
| Pt_ZPR_small_Lzipper | 748 | 749 |
| A.hypogaea_EG373732#1 | 750 | 751 |
| A.lyrata_322199#1 | 752 | 753 |
| A.lyrata_899056#1 | 754 | 755 |
| A.thaliana_AT2G45450.1 | 756 | 757 |
| A.thaliana_AT3G60890.1#1 | 758 | 759 |
| A.trichopoda_CK765457#1 | 760 | 761 |
| B.napus_CD822359#1 | 762 | 763 |
| C.annuum_TC13916#1 | 764 | 765 |
| C.intybus_EH709619#1 | 766 | 767 |
| C.melo_EB715099#1 | 768 | 769 |
| C.sinensis_TC13047#1 | 770 | 771 |
| C.tinctorius_EL400918#1 | 772 | 773 |
| E.tef_DN482990#1 | 774 | 775 |
| E.tirucalli_BP956571#1 | 776 | 777 |
| G.hirsutum_DW501389#1 | 778 | 779 |
| G.hirsutum_DW518216#1 | 780 | 781 |
| G.hirsutum_TC163217#1 | 782 | 783 |
| G.hybrid_AJ765000#1 | 784 | 785 |
| G.max_Glyma01g34620.1#1 | 786 | 787 |
| G.max_Glyma09g40450.1#1 | 788 | 789 |
| G.max_GM06MC39606_50673886@38431#1 | 790 | 791 |
| G.max_GM06MSsu40h07.r_46819511@70598#1 | 792 | 793 |
| G.max_TC281725#1 | 794 | 795 |
| G.max_TC286014#1 | 796 | 797 |
| G.max_TC305219#1 | 798 | 799 |
| L.perennis_TA2167_43195#1 | 800 | 801 |
| L.sativa_TC25720#1 | 802 | 803 |
| L.serriola_DW114794#1 | 804 | 805 |
| L.serriola_DW122307#1 | 806 | 807 |
| L.virosa_DW156764#1 | 808 | 809 |
| M.domestica_TC51427#1 | 810 | 811 |
| N.tabacum_TC60414#1 | 812 | 813 |
| O.sativa_LOC_Os09g34890.1#1 | 814 | 815 |
| Os_ZPRa_Os09g0520500 | 816 | 817 |
| P.abies_AM172974#1 | 818 | 819 |
| P.deltoides_TA3399_3696#1 | 820 | 821 |
| P.sitchensis_TA14065_3332#1 | 822 | 823 |
| P.tremula_TA8085_113636#1 | 824 | 825 |
| P.trichocarpa_554264#1 | 826 | 827 |
| P.trichocarpa_823907#1 | 828 | 829 |
| P.vulgaris_FE900059#1 | 830 | 831 |
| R.chinensis_BI978399#1 | 832 | 833 |
| S.bicolor_Sb02g030180.1#1 | 834 | 835 |
| S.hybrid_CF573336#1 | 836 | 837 |
| S.hybrid_CF575621#1 | 838 | 839 |
| S.lycopersicum_TC207895#1 | 840 | 841 |
| S.propinquum_TA5427_132711#1 | 842 | 843 |
| S.tuberosum_EG011112#1 | 844 | 845 |
| S.tuberosum_TC176950#1 | 846 | 847 |
| T.cacao_CU522069#1 | 848 | 849 |
| T.cacao_TC3649#1 | 850 | 851 |
| T.cryptomerioides_DN975845#1 | 852 | 853 |
| Triphysaria_sp_TC4136#1 | 854 | 855 |
| V.vinifera_GSVIVT00001026001#1 | 856 | 857 |
| V.vinifera_GSVIVT00026366001#1 | 858 | 859 |
| Z.mays_BG842570#1 | 860 | 861 |
| Z.mays_c62174110gm030403@15401#1 | 862 | 863 |
| Z.mays_c62219732gm030403@9841#1 | 864 | 865 |
| Z.mays_TC477977#1 | 866 | 867 |
| Z.mays_TC529546#1 | 868 | 869 |
| Z.mays_ZM07MC28025_BFb0123H02@27941#1 | 870 | 871 |
| Zeama_ZmPC0129214_ZPRB | 872 | 873 |
| A.thaliana_AT2G36307.1 | 874 | 875 |
| A.thaliana_AT3G52770.1 | 876 | 877 |
| B.napus_BN06MC24768_49494820@24676#1 | 878 | 879 |
| H.annuus_CD854488#1 | 880 | 881 |
| H.vulgare_TC169924#1 | 882 | 883 |
| L.perennis_DW077975#1 | 884 | 885 |
| M.truncatula_AC154034_39.5#1 | 886 | 887 |
| N.tabacum_AM841801#1 | 888 | 889 |
| O.sativa_LOC_Os04g33560.1#1 | 890 | 891 |
| Os_ZPRc_Os02g0530500 | 892 | 893 |
| Os_ZPRd_Os12g05560 | 894 | 895 |
| Os_ZPRe_Os11g05430 | 896 | 897 |
| P.trichocarpa_548562#1 | 898 | 899 |
| P.trichocarpa_560740#1 | 900 | 901 |
| Pt_ZPR3 | 902 | 903 |
| R.hybrid_EC587934#1 | 904 | 905 |
| S.bicolor_Sb04g021620.1#1 | 906 | 907 |
| S.bicolor_Sb06g015480.1#1 | 908 | 909 |
| V.vinifera_GSVIVT00021631001#1 | 910 | 911 |
| Z.mays_c62080453gm030403@7498#1 | 912 | 913 |
| Z.mays_TC487620#1 | 914 | 915 |
| Z.mays_TC492042#1 | 916 | 917 |
| Z.mays_ZM07MC37474_BFb0118O06@37348#1 | 918 | 919 |
| Zea_mays_AC217051.3_FGT005#1 | 920 | 921 |
| Zea_mays_GRMZM2G062504_T01#1 | 922 | 923 |
| Zeama_Zmcl15605_1_ZPRA | 924 | 925 |

[0687] Sequences have been tentatively assembled and publicly disclosed by research institutions, such as The Institute for Genomic Research (TIGR; beginning with TA). For instance, the Eukaryotic Gene Orthologs (EGO) database may be used to identify such related sequences, either by keyword search or by using the BLAST algorithm with the nucleic acid sequence or polypeptide sequence of interest. Special nucleic acid sequence databases have been created for particular organisms, e.g. for certain prokaryotic organisms, such as by the Joint Genome Institute. Furthermore, access to proprietary databases, has allowed the identification of novel nucleic acid and polypeptide sequences.

### Example 22

### Alignment of ZPR Polypeptide Sequences

[0688] Alignment of polypeptide sequences was performed using MAFFT (version 6.624, L-INS-I method—Katoh and Toh (2008)—Briefings in Bioinformatics 9:286-298). Minor manual editing was done to further optimize the alignment. A representative number of ZPR polypeptides are aligned in FIG. 13. The represented ZPR polypeptides are characterized in that the Leucine Zipper domain is located in the central to C-terminal region of said ZPR polypeptide.

### Example 23

### Calculation of Global Percentage Identity Between Polypeptide Sequences

[0689] Global percentages of similarity and identity between full length polypeptide sequences useful in performing the methods of the invention were determined using one of the methods available in the art, the MatGAT (Matrix Global Alignment Tool) software (BMC Bioinformatics. 2003 4:29. MatGAT: an application that generates similarity/identity matrices using protein or DNA sequences. Campanella J J, Bitincka L, Smalley J; software hosted by Ledion Bitincka). MatGAT software generates similarity/identity matrices for DNA or protein sequences without needing pre-alignment of the data. The program performs a series of pair-wise alignments using the Myers and Miller global alignment algorithm (with a gap opening penalty of 12, and a gap extension penalty of 2), calculates similarity and identity using for example Blosum 62 (for polypeptides), and then places the results in a distance matrix.

[0690] Results of the analysis are shown in FIG. 14 for the global similarity and identity over the full length of a representative number of polypeptide sequences. Sequence similarity is shown in the bottom half of the dividing line and sequence identity is shown in the top half of the diagonal dividing line. Parameters used in the comparison were: Scoring matrix: Blosum62, First Gap: 12, Extending Gap: 2. The sequence identity (in %) between the ZPR polypeptide sequences useful in performing the methods of the invention is generally higher than 20% compared to SEQ ID NO: 747.

### Example 24

### Identification of Domains Comprised in Polypeptide Sequences Useful in Performing the Methods of the Invention

[0691] The Integrated Resource of Protein Families, Domains and Sites (InterPro) database is an integrated interface for the commonly used signature databases for text- and sequence-based searches. The InterPro database combines these databases, which use different methodologies and varying degrees of biological information about well-characterized proteins to derive protein signatures. Collaborating databases include SWISS-PROT, PROSITE, TrEMBL, PRINTS, ProDom and Pfam, Smart and TIGRFAMs. Pfam is a large collection of multiple sequence alignments and hidden Markov models covering many common protein domains and families. Pfam is hosted at the Sanger Institute server in the United Kingdom. Interpro is hosted at the European Bioinformatics Institute in the United Kingdom.

### Example 25

### Topology Prediction of the ZPR Polypeptide Sequences

[0692] TargetP 1.1 predicts the subcellular location of eukaryotic proteins. The location assignment is based on the predicted presence of any of the N-terminal pre-sequences: chloroplast transit peptide (cTP), mitochondrial targeting peptide (mTP) or secretory pathway signal peptide (SP). Scores on which the final prediction is based are not really probabilities, and they do not necessarily add to one. However, the location with the highest score is the most likely according to TargetP, and the relationship between the scores (the reliability class) may be an indication of how certain the prediction is. The reliability class (RC) ranges from 1 to 5, where 1 indicates the strongest prediction. TargetP is maintained at the server of the Technical University of Denmark.

[0693] For the sequences predicted to contain an N-terminal presequence a potential cleavage site can also be predicted.

[0694] A number of parameters can be selected, such as organism group (non-plant or plant), cutoff sets (none, predefined set of cutoffs, or user-specified set of cutoffs), and the calculation of prediction of cleavage sites (yes or no).

[0695] Many other algorithms can be used to perform such analyses, including:
[0696] ChloroP 1.1 hosted on the server of the Technical University of Denmark;
[0697] Protein Prowler Subcellular Localisation Predictor version 1.2 hosted on the server of the Institute for Molecular Bioscience, University of Queensland, Brisbane, Australia;
[0698] PENCE Proteome Analyst PA-GOSUB 2.5 hosted on the server of the University of Alberta, Edmonton, Alberta, Canada;
[0699] TMHMM, hosted on the server of the Technical University of Denmark
[0700] PSORT (URL: psort.org)
[0701] PLOC (Park and Kanehisa, Bioinformatics, 19, 1656-1663, 2003).

### Example 26

### Functional Assay for a ZPR Polypeptide

[0702] LITTLE ZIPPER (ZPR) genes have HD-ZIPIII-suppressing activity and are transcriptionally upregulated by HD-ZIPIII activity (see Wenkel et al. (2007). Wenkel et al. (2007) described that the structural features of ZPR proteins, and their induction by HD-ZIPIII activity, suggest a model for the action of the ZPR genes as part of a negative feedback loop on HD-ZIPIII function. In the regulatory module proposed by Wenkel et al. (2007), HD-ZIPIII proteins activate transcription of the ZPR genes. The ZPR proteins then form heterodimers with the HD-ZIPIII proteins, preventing or altering their DNA binding.

[0703] Kim et al. (2008) demonstrated that a small ZIP protein, ZPR3, and its functionally redundant homolog, ZPR4, negatively regulate the HD-ZIP III activity in Shoot apical meristem (SAM) development. ZPR3 directly interacts with PHABULOSA (PHB) and other HD-ZIP III proteins via the ZIP motifs and forms nonfunctional heterodimers. In view thereof, Kim et al. (2008) proposed that HD-ZIPIII activity in regulating SAM is modulated by, among other things, a feedback loop involving the competitive inhibitors ZPR3 and ZPR4.

### Example 27

### Cloning of the ZPR Encoding Nucleic Acid Sequence

[0704] The nucleic acid sequence was amplified by PCR using as template a custom-made Solanum lycopersicum seedlings cDNA library. PCR was performed using a commercially available proofreading Taq DNA polymerase in standard conditions, using 200 ng of template in a 50 μl PCR mix. The primers used were prm15860 (SEQ ID NO: 926; sense): prm15860: 5′ ggggacaagtttgtacaaaaaagcaggcttaaacaatgtgtcatgcaatttcagatcat 3′ and prm15859 (SEQ ID NO: 927; reverse, complementary): 5′-ggggaccactttgtacaaga aagctgggtctaattgtgattattagagggttgagaa 3′, which include the AttB sites for Gateway recombination. The amplified PCR fragment was purified also using standard methods. The first step of the Gateway procedure, the BP reaction, was then performed, during which the PCR fragment recombined in vivo with the pDONR201 plasmid to produce, according to the Gateway terminology, an “entry clone”, pZPR. Plasmid pDONR201 was purchased from Invitrogen, as part of the Gateway® technology.

[0705] The entry clone comprising SEQ ID NO: 746 was then used in an LR reaction with a destination vector used for Oryza sativa transformation. This vector contained as functional elements within the T-DNA borders: a plant selectable marker; a screenable marker expression cassette; and a Gateway cassette intended for LR in vivo recombination with the nucleic acid sequence of interest already cloned in the entry clone. A rice GOS2 promoter (SEQ ID NO: 928) for constitutive expression was located upstream of this Gateway cassette.

[0706] After the LR recombination step, the resulting expression vector pGOS2::ZPR (FIG. 15) was transformed into Agrobacterium strain LBA4044 according to methods well known in the art.

### Example 28

### Plant Transformation

### Rice Transformation

[0707] The Agrobacterium containing the expression vector was used to transform Oryza sativa plants. Mature dry seeds of the rice japonica cultivar Nipponbare were dehusked.

[0708] Sterilization was carried out by incubating for one minute in 70% ethanol, followed by 30 minutes in 0.2% HgCl₂, followed by a 6 times 15 minutes wash with sterile distilled water. The sterile seeds were then germinated on a medium containing 2,4-D (callus induction medium). After incubation in the dark for four weeks, embryogenic, scutellum-derived calli were excised and propagated on the same medium. After two weeks, the calli were multiplied or propagated by subculture on the same medium for another 2 weeks. Embryogenic callus pieces were sub-cultured on fresh medium 3 days before co-cultivation (to boost cell division activity).

[0709] Agrobacterium strain LBA4404 containing the expression vector was used for co-cultivation. Agrobacterium was inoculated on AB medium with the appropriate antibiotics and cultured for 3 days at 28° C. The bacteria were then collected and suspended in liquid co-cultivation medium to a density (OD₆₀₀) of about 1. The suspension was then transferred to a Petri dish and the calli immersed in the suspension for 15 minutes. The callus tissues were then blotted dry on a filter paper and transferred to solidified, co-cultivation medium and incubated for 3 days in the dark at 25° C. Co-cultivated calli were grown on 2,4-D-containing medium for 4 weeks in the dark at 28° C. in the presence of a selection agent. During this period, rapidly growing resistant callus islands developed. After transfer of this material to a regeneration medium and incubation in the light, the embryogenic potential was released and shoots developed in the next four to five weeks. Shoots were excised from the calli and incubated for 2 to 3 weeks on an auxin-containing medium from which they were transferred to soil. Hardened shoots were grown under high humidity and short days in a greenhouse.

[0710] Approximately 35 independent T0 rice transformants were generated for one construct. The primary transformants were transferred from a tissue culture chamber to a greenhouse. After a quantitative PCR analysis to verify copy number of the T-DNA insert, only single copy transgenic plants that exhibit tolerance to the selection agent were kept for harvest of T1 seed. Seeds were then harvested three to five months after transplanting. The method yielded single locus transformants at a rate of over 50% (Aldemita and Hodges 1996, Chan et al. 1993, Hiei et al. 1994).

### Example 29

### Transformation of Other Crops

### Corn Transformation

[0711] Transformation of maize (Zea mays) is performed with a modification of the method described by Ishida et al. (1996) Nature Biotech 14(6): 745-50. Transformation is genotype-dependent in corn and only specific genotypes are amenable to transformation and regeneration. The inbred line A188 (University of Minnesota) or hybrids with A188 as a parent are good sources of donor material for transformation, but other genotypes can be used successfully as well. Ears are harvested from corn plant approximately 11 days after pollination (DAP) when the length of the immature embryo is about 1 to 1.2 mm. Immature embryos are cocultivated with Agrobacterium tumefaciens containing the expression vector, and transgenic plants are recovered through organogenesis. Excised embryos are grown on callus induction medium, then maize regeneration medium, containing the selection agent (for example imidazolinone but various selection markers can be used). The Petri plates are incubated in the light at 25° C. for 2-3 weeks, or until shoots develop. The green shoots are transferred from each embryo to maize rooting medium and incubated at 25° C. for 2-3 weeks, until roots develop. The rooted shoots are transplanted to soil in the greenhouse. T1 seeds are produced from plants that exhibit tolerance to the selection agent and that contain a single copy of the T-DNA insert.

### Wheat Transformation

[0712] Transformation of wheat is performed with the method described by Ishida et al. (1996) Nature Biotech 14(6): 745-50. The cultivar Bobwhite (available from CIMMYT, Mexico) is commonly used in transformation. Immature embryos are co-cultivated with Agrobacterium tumefaciens containing the expression vector, and transgenic plants are recovered through organogenesis. After incubation with Agrobacterium, the embryos are grown in vitro on callus induction medium, then regeneration medium, containing the selection agent (for example imidazolinone but various selection markers can be used). The Petri plates are incubated in the light at 25° C. for 2-3 weeks, or until shoots develop. The green shoots are transferred from each embryo to rooting medium and incubated at 25° C. for 2-3 weeks, until roots develop. The rooted shoots are transplanted to soil in the greenhouse. T1 seeds are produced from plants that exhibit tolerance to the selection agent and that contain a single copy of the T-DNA insert.

### Soybean Transformation

[0713] Soybean is transformed according to a modification of the method described in the Texas A&M patent U.S. Pat. No. 5,164,310. Several commercial soybean varieties are amenable to transformation by this method. The cultivar Jack (available from the Illinois Seed foundation) is commonly used for transformation. Soybean seeds are sterilised for in vitro sowing. The hypocotyl, the radicle and one cotyledon are excised from seven-day old young seedlings. The epicotyl and the remaining cotyledon are further grown to develop axillary nodes. These axillary nodes are excised and incubated with Agrobacterium tumefaciens containing the expression vector. After the cocultivation treatment, the explants are washed and transferred to selection media. Regenerated shoots are excised and placed on a shoot elongation medium. Shoots no longer than 1 cm are placed on rooting medium until roots develop. The rooted shoots are transplanted to soil in the greenhouse. T1 seeds are produced from plants that exhibit tolerance to the selection agent and that contain a single copy of the T-DNA insert.

### Rapeseed/Canola Transformation

[0714] Cotyledonary petioles and hypocotyls of 5-6 day old young seedling are used as explants for tissue culture and transformed according to Babic et al. (1998, Plant Cell Rep 17: 183-188). The commercial cultivar Westar (Agriculture Canada) is the standard variety used for transformation, but other varieties can also be used. Canola seeds are surface-sterilized for in vitro sowing. The cotyledon petiole explants with the cotyledon attached are excised from the in vitro seedlings, and inoculated with Agrobacterium (containing the expression vector) by dipping the cut end of the petiole explant into the bacterial suspension. The explants are then cultured for 2 days on MSBAP-3 medium containing 3 mg/l BAP, 3% sucrose, 0.7% Phytagar at 23° C., 16 hr light. After two days of co-cultivation with Agrobacterium, the petiole explants are transferred to MSBAP-3 medium containing 3 mg/l BAP, cefotaxime, carbenicillin, or timentin (300 mg/l) for 7 days, and then cultured on MSBAP-3 medium with cefotaxime, carbenicillin, or timentin and selection agent until shoot regeneration. When the shoots are 5-10 mm in length, they are cut and transferred to shoot elongation medium (MSBAP-0.5, containing 0.5 mg/l BAP). Shoots of about 2 cm in length are transferred to the rooting medium (MS0) for root induction. The rooted shoots are transplanted to soil in the greenhouse. T1 seeds are produced from plants that exhibit tolerance to the selection agent and that contain a single copy of the T-DNA insert.

### Alfalfa Transformation

[0715] A regenerating clone of alfalfa (Medicago sativa) is transformed using the method of (McKersie et al., 1999 Plant Physiol 119: 839-847). Regeneration and transformation of alfalfa is genotype dependent and therefore a regenerating plant is required. Methods to obtain regenerating plants have been described. For example, these can be selected from the cultivar Rangelander (Agriculture Canada) or any other commercial alfalfa variety as described by Brown D C W and A Atanassov (1985. Plant Cell Tissue Organ Culture 4: 111-112). Alternatively, the RA3 variety (University of Wisconsin) has been selected for use in tissue culture (Walker et al., 1978 Am J Bot 65:654-659). Petiole explants are cocultivated with an overnight culture of Agrobacterium tumefaciens C58C1 pMP90 (McKersie et al., 1999 Plant Physiol 119: 839-847) or LBA4404 containing the expression vector. The explants are cocultivated for 3 d in the dark on SH induction medium containing 288 mg/L Pro, 53 mg/L thioproline, 4.35 g/L K2SO4, and 100 μm acetosyringinone. The explants are washed in half-strength Murashige-Skoog medium (Murashige and Skoog, 1962) and plated on the same SH induction medium without acetosyringinone but with a suitable selection agent and suitable antibiotic to inhibit Agrobacterium growth. After several weeks, somatic embryos are transferred to BOi2Y development medium containing no growth regulators, no antibiotics, and 50 g/L sucrose. Somatic embryos are subsequently germinated on half-strength Murashige-Skoog medium. Rooted seedlings were transplanted into pots and grown in a greenhouse. T1 seeds are produced from plants that exhibit tolerance to the selection agent and that contain a single copy of the T-DNA insert.

### Cotton Transformation

[0716] Cotton is transformed using Agrobacterium tumefaciens according to the method described in U.S. Pat. No. 5,159,135. Cotton seeds are surface sterilised in 3% sodium hypochlorite solution during 20 minutes and washed in distilled water with 500 μg/ml cefotaxime. The seeds are then transferred to SH-medium with 50 μg/ml benomyl for germination. Hypocotyls of 4 to 6 days old seedlings are removed, cut into 0.5 cm pieces and are placed on 0.8% agar. An Agrobacterium suspension (approx. 108 cells per ml, diluted from an overnight culture transformed with the gene of interest and suitable selection markers) is used for inoculation of the hypocotyl explants. After 3 days at room temperature and lighting, the tissues are transferred to a solid medium (1.6 g/l Gelrite) with Murashige and Skoog salts with B5 vitamins (Gamborg et al., Exp. Cell Res. 50:151-158 (1968)), 0.1 mg/l 2,4-D, 0.1 mg/l 6-furfurylaminopurine and 750 μg/ml MgCL2, and with 50 to 100 μg/ml cefotaxime and 400-500 μg/ml carbenicillin to kill residual bacteria. Individual cell lines are isolated after two to three months (with subcultures every four to six weeks) and are further cultivated on selective medium for tissue amplification (30° C., 16 hr photoperiod). Transformed tissues are subsequently further cultivated on non-selective medium during 2 to 3 months to give rise to somatic embryos. Healthy looking embryos of at least 4 mm length are transferred to tubes with SH medium in fine vermiculite, supplemented with 0.1 mg/l indole acetic acid, 6 furfurylaminopurine and gibberellic acid. The embryos are cultivated at 30° C. with a photoperiod of 16 hrs, and plantlets at the 2 to 3 leaf stage are transferred to pots with vermiculite and nutrients. The plants are hardened and subsequently moved to the greenhouse for further cultivation.

### Sugarbeet Transformation

[0717] Seeds of sugarbeet (Beta vulgaris L.) are sterilized in 70% ethanol for one minute followed by 20 min. shaking in 20% Hypochlorite bleach e.g. Clorox® regular bleach (commercially available from Clorox, 1221 Broadway, Oakland, Calif. 94612, USA). Seeds are rinsed with sterile water and air dried followed by plating onto germinating medium (Murashige and Skoog (MS) based medium (Murashige, T., and Skoog, 1962. Physiol. Plant, vol. 15, 473-497) including B5 vitamins (Gamborg et al.; Exp. Cell Res., vol. 50, 151-8.) supplemented with 10 g/l sucrose and 0.8% agar). Hypocotyl tissue is used essentially for the initiation of shoot cultures according to Hussey and Hepher (Hussey, G., and Hepher, A., 1978. Annals of Botany, 42, 477-9) and are maintained on MS based medium supplemented with 30 g/l sucrose plus 0.25 mg/l benzylamino purine and 0.75% agar, pH 5.8 at 23-25° C. with a 16-hour photoperiod. Agrobacterium tumefaciens strain carrying a binary plasmid harbouring a selectable marker gene, for example nptII, is used in transformation experiments. One day before transformation, a liquid LB culture including antibiotics is grown on a shaker (28° C., 150 rpm) until an optical density (O.D.) at 600 nm of ˜1 is reached. Overnight-grown bacterial cultures are centrifuged and resuspended in inoculation medium (O.D. ˜1) including Acetosyringone, pH 5.5. Shoot base tissue is cut into slices (1.0 cm×1.0 cm×2.0 mm approximately). Tissue is immersed for 30 s in liquid bacterial inoculation medium. Excess liquid is removed by filter paper blotting. Co-cultivation occurred for 24-72 hours on MS based medium incl. 30 g/l sucrose followed by a non-selective period including MS based medium, 30 g/l sucrose with 1 mg/l BAP to induce shoot development and cefotaxim for eliminating the Agrobacterium. After 3-10 days explants are transferred to similar selective medium harbouring for example kanamycin or G418 (50-100 mg/l genotype dependent). Tissues are transferred to fresh medium every 2-3 weeks to maintain selection pressure. The very rapid initiation of shoots (after 3-4 days) indicates regeneration of existing meristems rather than organogenesis of newly developed transgenic meristems. Small shoots are transferred after several rounds of subculture to root induction medium containing 5 mg/l NAA and kanamycin or G418. Additional steps are taken to reduce the potential of generating transformed plants that are chimeric (partially transgenic). Tissue samples from regenerated shoots are used for DNA analysis. Other transformation methods for sugarbeet are known in the art, for example those by Linsey & Gallois (Linsey, K., and Gallois, P., 1990. Journal of Experimental Botany; vol. 41, No. 226; 529-36) or the methods published in the international application published as WO9623891A.

### Sugarcane Transformation

[0718] Spindles are isolated from 6-month-old field grown sugarcane plants (see Arencibia et al., 1998. Transgenic Research, vol. 7, 213-22; Enriquez-Obregon et al., 1998. Planta, vol. 206, 20-27). Material is sterilized by immersion in a 20% Hypochlorite bleach e.g. Clorox® regular bleach (commercially available from Clorox, 1221 Broadway, Oakland, Calif. 94612, USA) for 20 minutes. Transverse sections around 0.5 cm are placed on the medium in the top-up direction. Plant material is cultivated for 4 weeks on MS (Murashige, T., and Skoog, 1962. Physiol. Plant, vol. 15, 473-497) based medium incl. B5 vitamins (Gamborg, O., et al., 1968. Exp. Cell Res., vol. 50, 151-8) supplemented with 20 g/l sucrose, 500 mg/l casein hydrolysate, 0.8% agar and 5 mg/l 2,4-D at 23° C. in the dark. Cultures are transferred after 4 weeks onto identical fresh medium. Agrobacterium tumefaciens strain carrying a binary plasmid harbouring a selectable marker gene, for example hpt, is used in transformation experiments. One day before transformation, a liquid LB culture including antibiotics is grown on a shaker (28° C., 150 rpm) until an optical density (O.D.) at 600 nm of ˜0.6 is reached. Overnight-grown bacterial cultures are centrifuged and resuspended in MS based inoculation medium (O.D. ˜0.4) including acetosyringone, pH 5.5. Sugarcane embryogenic callus pieces (2-4 mm) are isolated based on morphological characteristics as compact structure and yellow colour and dried for 20 min. in the flow hood followed by immersion in a liquid bacterial inoculation medium for 10-20 minutes. Excess liquid is removed by filter paper blotting. Co-cultivation occurred for 3-5 days in the dark on filter paper which is placed on top of MS based medium incl. B5 vitamins containing 1 mg/l 2,4-D. After co-cultivation calli are washed with sterile water followed by a non-selective cultivation period on similar medium containing 500 mg/l cefotaxime for eliminating remaining Agrobacterium cells. After 3-10 days explants are transferred to MS based selective medium incl. B5 vitamins containing 1 mg/l 2,4-D for another 3 weeks harbouring 25 mg/l of hygromycin (genotype dependent). All treatments are made at 23° C. under dark conditions. Resistant calli are further cultivated on medium lacking 2,4-D including 1 mg/l BA and 25 mg/l hygromycin under 16 h light photoperiod resulting in the development of shoot structures. Shoots are isolated and cultivated on selective rooting medium (MS based including, 20 g/l sucrose, 20 mg/l hygromycin and 500 mg/l cefotaxime). Tissue samples from regenerated shoots are used for DNA analysis. Other transformation methods for sugarcane are known in the art, for example from the in-ternational application published as WO2010/151634A and the granted European patent EP1831378.

### Example 30

### Phenotypic Evaluation Procedure

### 30.1 Evaluation Setup

[0719] Approximately 35 independent T0 rice transformants were generated. The primary transformants were transferred from a tissue culture chamber to a greenhouse for growing and harvest of T1 seed. Six events, of which the T1 progeny segregated 3:1 for presence/absence of the transgene, were retained. For each of these events, approximately 10 T1 seedlings containing the transgene (hetero- and homo-zygotes) and approximately 10 T1 seedlings lacking the transgene (nullizygotes) were selected by monitoring visual marker expression. The transgenic plants and the corresponding nullizygotes were grown side-by-side at random positions. Greenhouse conditions were of shorts days (12 hours light), 28° C. in the light and 22° C. in the dark, and a relative humidity of 70%. Plants grown under non-stress conditions were watered at regular intervals to ensure that water and nutrients were not limiting and to satisfy plant needs to complete growth and development, unless they were used in a stress screen.

[0720] From the stage of sowing until the stage of maturity the plants were passed several times through a digital imaging cabinet. At each time point digital images (2048×1536 pixels, 16 million colours) were taken of each plant from at least 6 different angles.

[0721] T1 events can be further evaluated in the T2 generation following the same evaluation procedure as for the T1 generation, e.g. with less events and/or with more individuals per event.

### Drought Screen

[0722] T1 or T2 plants are grown in potting soil under normal conditions until they approached the heading stage. They are then transferred to a “dry” section where irrigation is withheld. Soil moisture probes are inserted in randomly chosen pots to monitor the soil water content (SWC). When SWC goes below certain thresholds, the plants are automatically re-watered continuously until a normal level is reached again. The plants are then re-transferred again to normal conditions. The rest of the cultivation (plant maturation, seed harvest) is the same as for plants not grown under abiotic stress conditions. Growth and yield parameters are recorded as detailed for growth under normal conditions.

### Nitrogen Use Efficiency Screen

[0723] T1 or T2 plants are grown in potting soil under normal conditions except for the nutrient solution. The pots are watered from transplantation to maturation with a specific nutrient solution containing reduced N nitrogen (N) content, usually between 7 to 8 times less. The rest of the cultivation (plant maturation, seed harvest) is the same as for plants not grown under abiotic stress. Growth and yield parameters are recorded as detailed for growth under normal conditions.

### Salt Stress Screen

[0724] T1 or T2 plants are grown on a substrate made of coco fibers and particles of baked clay (Argex) (3 to 1 ratio). A normal nutrient solution is used during the first two weeks after transplanting the plantlets in the greenhouse. After the first two weeks, 25 mM of salt (NaCl) is added to the nutrient solution, until the plants are harvested. Growth and yield parameters are recorded as detailed for growth under normal conditions.

### 30.2 Statistical Analysis: F Test

[0725] A two factor ANOVA (analysis of variants) was used as a statistical model for the overall evaluation of plant phenotypic characteristics. An F test was carried out on all the parameters measured of all the plants of all the events transformed with the gene of the present invention. The F test was carried out to check for an effect of the gene over all the transformation events and to verify for an overall effect of the gene, also known as a global gene effect. The threshold for significance for a true global gene effect was set at a 5% probability level for the F test. A significant F test value points to a gene effect, meaning that it is not only the mere presence or position of the gene that is causing the differences in phenotype.

### 30.3 Parameters Measured

[0726] From the stage of sowing until the stage of maturity the plants were passed several times through a digital imaging cabinet. At each time point digital images (2048×1536 pixels, 16 million colours) were taken of each plant from at least 6 different angles as described in WO2010/031780. These measurements were used to determine different parameters.

### Biomass-Related Parameter Measurement

[0727] The plant aboveground area (or leafy biomass) was determined by counting the total number of pixels on the digital images from aboveground plant parts discriminated from the background. This value was averaged for the pictures taken on the same time point from the different angles and was converted to a physical surface value expressed in square mm by calibration. Experiments show that the aboveground plant area measured this way correlates with the biomass of plant parts above ground. The above ground area is the area measured at the time point at which the plant had reached its maximal leafy biomass.

[0728] Increase in root biomass is expressed as an increase in total root biomass (measured as maximum biomass of roots observed during the lifespan of a plant); or as an increase in the root/shoot index, measured as the ratio between root mass and shoot mass in the period of active growth of root and shoot. In other words, the root/shoot index is defined as the ratio of the rapidity of root growth to the rapidity of shoot growth in the period of active growth of root and shoot. Root biomass can be determined using a method as described in WO 2006/029987.

### Parameters Related to Development Time

[0729] The early vigour is the plant aboveground area three weeks post-germination. Early vigour was determined by counting the total number of pixels from aboveground plant parts discriminated from the background. This value was averaged for the pictures taken on the same time point from different angles and was converted to a physical surface value expressed in square mm by calibration.

[0730] AreaEmer is an indication of quick early development when this value is decreased compared to control plants. It is the ratio (expressed in %) between the time a plant needs to make 30% of the final biomass and the time needs to make 90% of its final biomass.

[0731] The “time to flower” or “flowering time” of the plant can be determined using the method as described in WO 2007/093444.

### Seed-Related Parameter Measurements

[0732] The mature primary panicles were harvested, counted, bagged, barcode-labelled and then dried for three days in an oven at 37° C. The panicles were then threshed and all the seeds were collected and counted. The seeds are usually covered by a dry outer covering, the husk. The filled husks (herein also named filled florets) were separated from the empty ones using an air-blowing device. The empty husks were discarded and the remaining fraction was counted again. The filled husks were weighed on an analytical balance. The total number of seeds was determined by counting the number of filled husks that remained after the separation step. The total seed weight was measured by weighing all filled husks harvested from a plant.

[0733] The total number of seeds (or florets) per plant was determined by counting the number of husks (whether filled or not) harvested from a plant.

[0734] Thousand Kernel Weight (TKW) is extrapolated from the number of seeds counted and their total weight.

[0735] The Harvest Index (HI) in the present invention is defined as the ratio between the total seed weight and the above ground area (mm²), multiplied by a factor 10⁶.

[0736] The number of flowers per panicle as defined in the present invention is the ratio between the total number of seeds over the number of mature primary panicles.

[0737] The “seed fill rate” or “seed filling rate” as defined in the present invention is the proportion (expressed as a %) of the number of filled seeds (i.e. florets containing seeds) over the total number of seeds (i.e. total number of florets). In other words, the seed filling rate is the percentage of florets that are filled with seed.

### Example 31

### Results of the Phenotypic Evaluation of the Transgenic Plants

[0738] The results of the evaluation of transgenic rice plants in the T1 generation and expressing a nucleic acid encoding the ZPR polypeptide of SEQ ID NO: 747 under non-stress conditions are presented below in Table C. When grown under non-stress conditions, an increase of at least 5% was observed for seed yield, including total weight of seeds, fill rate, number of filled seeds, harvest index, and number of flowers per panicle.

TABLE K
Data summary for transgenic rice plants; for each parameter,
the overall percent increase is shown for the confirmation
(T2 generation), for each parameter the p-value is <0.05.

| Parameter | Overall increase |
|---|---|
| totalwgseeds | 21.5 |
| fillrate | 21.1 |
| harvestindex | 18.4 |
| nrfilledseed | 19.8 |
| flowerperpan | 5.7 |

The application's sequence listing, which the Patent Office published only in electronic form, follows.

SEQUENCE LISTING (946 sequences)

SEQ ID NO: 1 - DNA, 972 bp, Oryza sativa
atgccgcgctatgatgatcgttatggaagcacgcgcttgtatgttggtagactgtcttcccgcactcgttctcgtgacctagaataccatttcagcagatatggaagaatacgtgaagtggagttgaagcgcgactacgcatttattgagttcagtgatccccgtgatgctgaggaagcaaggtacaaccttgatggcagggatgttgatggaagccgcattcttgttgagtttgctaaaggggttccacgtggtcctggtggttcacgtgaatatatggggagaggacctcctcctggaacaggtcggtgttttaactgtgggattgatggtcactgggcaagagactgcaaggctggtgactggaagaacaaatgttaccgctgtggggagagaggtcacatagaaagaaactgtcaaaacagcccaagaaatctcaggcgtgagagaagttattcatgctctccatcgccacgccgtggacgtggtcgcagtcggagctatagccggagccggagccggagccgcagttacagccggtctaggtccagatccctgtctggatctcccagggcacgcagagagcttgaaagatcaaggagtcttagttacagcaggagtcccaggcgatccatctccccagcagcaaatgaaaagaagcgcagccccacccctgatggtagccgtagtccaaggagtccacaggaccaggtgagcccaccacccaaggataatgctgagcgtaatggctcagatcacggtgacagcccccggggcagggagaacagcaggagcccgtctgatggctaccgtagccctgcagctgccaacgggcgcagcccaagcccaaggaacaatggaagccctagcccaatggacaacggtagccgaagtcctagggatggaaatggtgacggtggtagccgtggtggctcacgctcacctagaccgagcgagtctcctgaagcctga

SEQ ID NO: 2 - protein, 323 aa, Oryza sativa
MPRYDDRYGSTRLYVGRLSSRTRSRDLEYHFSRYGRIREVELKRDYAFIEFSDPRDAEEARYNLDGRDVDGSRILVEFAKGVPRGPGGSREYMGRGPPPGTGRCFNCGIDGHWARDCKAGDWKNKCYRCGERGHIERNCQNSPRNLRRERSYSCSPSPRRGRGRSRSYSRSRSRSRSYSRSRSRSLSGSPRARRELERSRSLSYSRSPRRSISPAANEKKRSPTPDGSRSPRSPQDQVSPPPKDNAERNGSDHGDSPRGRENSRSPSDGYRSPAAANGRSPSPRNNGSPSPMDNGSRSPRDGNGDGGSRGGSRSPRPSESPEA

SEQ ID NO: 3 - DNA, 450 bp, Saccharum officinarum
atgcctcgctatgatgaccgctatggaggcacgcgcttgtatgttggcagattggccccccgtactcgttcccgcgatttagaaaatctgttcggcagatatggaagaatacgagaagtggagttgaagcgcgactatgcatttattgagttcagtgatcatcgtgatgctgatgaggctcgataccaactagatggcagggatgttgatgggagtcgcattgttgttgagtttgccaaaggggtcccacgtggtccagctggctcacgtgaatatatgggaagaggccctccaccaggtacaggtcgttgtttcaactgtggaattgatggtcactgggcaagagactgtaaggctggtgactggaaaaacaaatgctaccgttgtggagaaagagggcatatagaaagaaattgccagaaacccaaagggtttcccccccctttttaa

SEQ ID NO: 4 - protein, 149 aa, Saccharum officinarum
MPRYDDRYGGTRLYVGRLAPRTRSRDLENLFGRYGRIREVELKRDYAFIEFSDHRDADEARYQLDGRDVDGSRIVVEFAKGVPRGPAGSREYMGRGPPPGTGRCFNCGIDGHWARDCKAGDWKNKCYRCGERGHIERNCQKPKGFPPPF

SEQ ID NO: 5 - DNA, 489 bp, Triticum aestivum
  misc_feature (309)..(309): n is a, c, g, or t
atgcctcgctacgatgagcgtgatcgttatggcggcaacacaaggctgtacgtgggtcgtcttccgtcgcgcacccgcacaagggaccttgaagacctcttcggcagatatgggagagtgcgacatgtggatatgaagcacgagtttgcatttgttgagtttagtgatcccagggatgctgatgaagcaaggtacaaccttgatggtcgtgactttgatggaagccgcatgattgttgagtttgctaaaggggttccgcgtggccaaggaggaggaggtgaccgtgaccgtggccgtggtggtgaccgngaatatatgggtcggggacctcctcctggttctggccgttgctttaactgtgggattgatgggcattgggctcgtgactgcaaagctggcgactggaaaaataggtgctatcgttgtggagatagtggccacatagaaagagattgccagaacagccctaagaacctcaagccgcagtag

SEQ ID NO: 6 - protein, 162 aa, Triticum aestivum
MPRYDERDRYGGNTRLYVGRLPSRTRTRDLEDLFGRYGRVRHVDMKHEFAFVEFSDPRDADEARYNLDGRDFDGSRMIVEFAKGVPRGQGGGGDRDRGRGGDREYMGRGPPPGSGRCFNCGIDGHWARDCKAGDWKNRCYRCGDSGHIERDCQNSPKNLKPQ

SEQ ID NO: 7 - DNA, 522 bp, Gossypium hirsutum
atgcctaggtatgatgatcgccgtggtggcactcgcctttatgtcggtcacttgtcttcaaggacaagatcacgtgatcttgaggacatgtttagcagatatggaagagtacgtgatgtggatatgaagcgcgactatgccttcgttgaattcagtgaccctagagatgctgatgatgcaagatattcattgaatggtcgagacctagacggatgccgtatcattgtggaatttgccaagggagtgccccgtggccctggtggatcacgtgattatgctggaagaggtcctactcctggatctgggcgctgcttcaattgtggaatcgatggccactgggctcgtgattgcaaagccggcgattggaagaataagtgttaccgctgtggggaacgaggccacatagaaagagattgtcaaaacagtccaaagaaactgagccgtaaaccacggagttactcgcgttcacccagtgaccgacgtggtcgaagcataagccgcagttacagccgaggggcgtag

SEQ ID NO: 8 - protein, 173 aa, Gossypium hirsutum
MPRYDDRRGGTRLYVGHLSSRTRSRDLEDMFSRYGRVRDVDMKRDYAFVEFSDPRDADDARYSLNGRDLDGCRIIVEFAKGVPRGPGGSRDYAGRGPTPGSGRCFNCGIDGHWARDCKAGDWKNKCYRCGERGHIERDCQNSPKKLSRKPRSYSRSPSDRRGRSISRSYSRGA

SEQ ID NO: 9 - DNA, 525 bp, Panicum virgatum
atgcctcgctatgatgatcgttatgggaacacacgcttgtatgttggcagactatcctcccgcactcgtacccgtgacctggaatatcttttcagcaaatatggaagaatacgagaagtggagttgaagcgcgactatgcatttattgaattcagcgatcctcgtgatgctgatgatgcacaatacaacctagatggcagggaagttgatggcagccgcattatcgttgagtttgctaaaggggttcctcgtggttctggcagctcacgcgagtacatgggaagagggcctccgccagggacaggtcgctgttttaactgtggaattgatggtcactgggcaagggattgcaaggctggtgactggaagaacaaatgctaccgttgtggagaaaggggccacatagaaagaaattgccagaacagtccaaggaatctgaggcgcgagagaagttattcacagtcaccatctccacgccgtggacgggggcgcagccggagctacagcagaagccgggagctatag

SEQ ID NO: 10 - protein, 174 aa, Panicum virgatum
MPRYDDRYGNTRLYVGRLSSRTRTRDLEYLFSKYGRIREVELKRDYAFIEFSDPRDADDAQYNLDGREVDGSRIIVEFAKGVPRGSGSSREYMGRGPPPGTGRCFNCGIDGHWARDCKAGDWKNKCYRCGERGHIERNCQNSPRNLRRERSYSQSPSPRRGRGRSRSYSRSREL

SEQ ID NO: 11 - DNA, 528 bp, Saccharum hybrid cultivar
atgcctcgctatgatgatcgctatgggaatacacgcttgtatgttggaagattggctccccgcacccgttcccgcgacctagaatatcttttcagcaaatatggaagaatacgtgaagtggagttgaagcgcgactatgcattcattgaattcagcgacccccaagatgctgatgatgcgcagtacaacctagatggcagggaagttgatggaagccggattattgttgaatttgctaaaggggttcctcgtggttctagtggttcacgtgaatatatgggaagaggacctccaccaggaacaggtcgttgttttaactgtggaattgatggtcactgggcaagagactgcaaggctggtgactggaagaacaaaatgttaccgtgtggcgaaaggggccatatagaaagaaattgccagaacagtccaaggaatctcaggcgtgagagaagctattcacgttctccatccccacgccgtggacggggcccgcagcccggagctacaagcagaagcccggagctatag

SEQ ID NO: 12 - protein, 175 aa, Saccharum hybrid cultivar
MPRYDDRYGNTRLYVGRLAPRTRSRDLEYLFSKYGRIREVELKRDYAFIEFSDPQDADDAQYNLDGREVDGSRIIVEFAKGVPRGSSGSREYMGRGPPPGTGRCFNCGIDGHWARDCKAGDWKNKMLPCGERGHIERNCQNSPRNLRRERSYSRSPSPRRGRGPQPGATSRSPEL

SEQ ID NO: 13 - DNA, 531 bp, Glycine max
atgcctcgctatgatgataaatacggcaatacccgcctctatgtgggacacttgtcttcgaggactcgttcccgtgatctggagcgtgcctttagcagatatggaagagttcgaggtgtggatatgaagaatgatttcgcttttgttgattttagtgatcctcgagatgctgatgatgcaagatataacctggatggtcgggatgttgatggaagtcggattattgtggaatttgcaaaaggggctcctcgtgggtcccgggaatatttggggcgaggtcctcctcctggctctggacgctgcttcaattgtggccttgatggccattgggcacgggattgcaaagctggggattggaagaataagtgttaccgctgtggggagagaggacatatagaaaggaactgcaagaacagccccaaaaaattgaggcgaggacggagttattcacgctcaccagtcaggtcacgttcacctcatcgcggcagaagccgtgatcgcagttacagccgagatcgcagctacaggtag

SEQ ID NO: 14 - protein, 176 aa, Glycine max
MPRYDDKYGNTRLYVGHLSSRTRSRDLERAFSRYGRVRGVDMKNDFAFVDFSDPRDADDARYNLDGRDVDGSRIIVEFAKGAPRGSREYLGRGPPPGSGRCFNCGLDGHWARDCKAGDWKNKCYRCGERGHIERNCKNSPKKLRRGRSYSRSPVRSRSPHRGRSRDRSYSRDRSYR

SEQ ID NO: 15 - DNA, 537 bp, Glycine max
atgcctcgctatgatgataaatacggcaatacccgcctctatgtgggacacttgtcttcgaggactcgttcccgtgatctggagcgtgcctttagcagatatggaagagttcgaggtgtggatatgaagaatgatttcgcttttgttgattttagtgatcctcgagatgctgatgatgcaagatataacctggatggtcgggatgttgatggaagtcggattattgtggaatttgcaaaaggggctcctcgtgggtcccgggaatatttggggcgaggtcctcctcctggctctggacgctgcttcaattgtggccttgatggccattgggcacgggattgcaaagctggggattggaagaataagtgttaccgctgtggggagagaggacatatagaaaggaactgcaagaacagccccaaaaaattgagcaccaggcgaggacggagttattcacgctcaccagtcaggtcacgttcacctcatcgcggcagaagccgtgatcgcagttacagccgagatcgcagctacaggtag

SEQ ID NO: 16 - protein, 178 aa, Glycine max
MPRYDDKYGNTRLYVGHLSSRTRSRDLERAFSRYGRVRGVDMKNDFAFVDFSDPRDADDARYNLDGRDVDGSRIIVEFAKGAPRGSREYLGRGPPPGSGRCFNCGLDGHWARDCKAGDWKNKCYRCGERGHIERNCKNSPKKLSTRRGRSYSRSPVRSRSPHRGRSRDRSYSRDRSYR

SEQ ID NO: 17 - DNA, 546 bp, Populus trichocarpa
atgccgcgatatgatgatcgatatgccagtacgcgtctctatgttggacacctggctgctaggacacgatcacgggatctggaacatcttttcagcaaatatgggcgagtacgagatgtggatatgaagcgtgactatgcatttgttgaatttagtgatcccagagatgctgatgatgcaaggcattacttagatggcaaggagtttgatggaagtcgtatcattgtggaatttgcaaagggggtacctcgtggttctcgagaatatttgggcagaggtcctcctccaggatctggacgctgctttaattgtggcattgatggccactgggctcgagattgcaaagctggagactggaagaacaagtgttatcgttgtggggaaagaggtcatatagagagaaactgcaagaacagtcccaagaaactcacgcggggaaagagttactctcgatcaccaggtagatcacgctctcctcaccgtggcagaagccgcagcccaagttatagccgaggtcgaagctacaggtctgtggtttttctttga

SEQ ID NO: 18 - protein, 181 aa, Populus trichocarpa
MPRYDDRYASTRLYVGHLAARTRSRDLEHLFSKYGRVRDVDMKRDYAFVEFSDPRDADDARHYLDGKEFDGSRIIVEFAKGVPRGSREYLGRGPPPGSGRCFNCGIDGHWARDCKAGDWKNKCYRCGERGHIERNCKNSPKKLTRGKSYSRSPGRSRSPHRGRSRSPSYSRGRSYRSVVFL

SEQ ID NO: 19 - DNA, 555 bp, Glycine soja
atgcctcgctatgatgataaatacggcaatacccgcctctatgtgggacacttgtcttcgaggactcgttcccgtgatctggagcgtgcctttagcagatatggaagagttcgaggtgtggatatgaagaatgatttcgcttttgttgatgttagtgatcctcgagatgctgatgatgcaagatataacctggatggtcgggatgttgatggaagtcggattattgtggaatttgcaaaaggggctcctcgtgggtcccgggaatattaggggcgaggtcctcctcctggctctggacgctgcttcaattgtggccttgatggccattgggcacgggattgcaaagctggggattggaagaataagtgttaccgctgtggggagagaggacatatagaaaggaactgcaagaacagccccaaaaaatggaggcgaggacagagttattcacgctcaccagtcaggtcacgtgcacctcatcgcggcagagccgtgatcgcagtacagccgagatcgagctacagtcgatcacgaatccctgtgagaagagaagaa

SEQ ID NO: 20 - protein, 184 aa, Glycine soja
MPRYDDKYGNTRLYVGHLSSRTRSRDLERAFSRYGRVRGVDMKNDFAFVDVSDPRDADDARYNLDGRDVDGSRIIVEFAKGAPRGSREYGRGPPPGSGRCFNCGLDGHWARDCKAGDWKNKCYRCGERGHIERNCKNSPKKWRRGQSYSRSPVRSRAPHRGRAVIAVQPRSSYSRSRIPVRREE

SEQ ID NO: 21 - DNA, 582 bp, Nicotiana tabacum
atgcctcgttatgatgatcggtcgggaaatagcacccgtctctatgtgggccacttgtcttcacggacccgctcacgtgatctggagcgtgtattcagtaaatatgggagagtacgagatgtggatatgaagcacgactatgccttcgtagaatttagtgatccacgagatgctgatgatgcaagatactatttagacggccgggacgttgatggccgccgcataattgtggaatttgccaagggagtgccacgtggacctggtggttcgcgtgagtatcttggcaaaggacctgctcctggctcaggccgctgcttcaactgtggccttgaaggtcactgggctcgagattgcaaagctggggattggaagaacaaatgttatcggtgtggagaaagaggtcatatagaaaaaaaatgcccaaatagtcctaaaaaactcagtcgacgggatcggagctactcacggtcacctgtcaggtcaaggtcacgttcacgttctcctcgtcgtcgaagttacagcagaagccgcagctatagtccatcaagatctcctcctccaagagaggaaaagctgacctag

SEQ ID NO: 22 - protein, 193 aa, Nicotiana tabacum
MPRYDDRSGNSTRLYVGHLSSRTRSRDLERVFSKYGRVRDVDMKHDYAFVEFSDPRDADDARYYLDGRDVDGRRIIVEFAKGVPRGPGGSREYLGKGPAPGSGRCFNCGLEGHWARDCKAGDWKNKCYRCGERGHIEKKCPNSPKKLSRRDRSYSRSPVRSRSRSRSPRRRSYSRSRSYSPSRSPPPREEKLT

SEQ ID NO: 23 - DNA, 594 bp, Allium cepa
atgcctcgttatgatgatcgttatggcaacacaaggttgtacattgggcatttatcatcaaggacccgttcacgtgatcttgaagacttgtttggccgatatggcagagtacgagatgtggatatgaagcgcgactatgcatttgttgaattcagcgatcctagggatgcagatgatgcaaggtacagcttggatggtagagaatttgatggaagtcgtcttatcgtggaatttgcaaaagggcatccacgtggtggaggtggaggtgggtcccgtgaatatctaggaaggggtccagaacctggttctggtcgttgcttcaattgtggcattgatgggcactgggctagagactgcaaagccggtgactggaaaaacaagtgctatcgctgtggggagcgtggtcatatagaaaggaactgtcaaaatagcccaaagagtctcaagcgtgggagaagttattctaggtcaccgtctcctcgcccgaggcgtagtaggagaagcagaagcagaagcttcagccgtagtcgaagttacagcccgatcgagatcccctgctccaaggaggagagagcgaagcatagacagagatga

SEQ ID NO: 24 - protein, 197 aa, Allium cepa
MPRYDDRYGNTRLYIGHLSSRTRSRDLEDLFGRYGRVRDVDMKRDYAFVEFSDPRDADDARYSLDGREFDGSRLIVEFAKGHPRGGGGGGSREYLGRGPEPGSGRCFNCGIDGHWARDCKAGDWKNKCYRCGERGHIERNCQNSPKSLKRGRSYSRSPSPRPRRSRRSRSRSFSRSRSYSPIEIPCSKEERAKHRQR

SEQ ID NO: 25 - DNA, 597 bp, Physcomitrella patens
atgtctcggtatgatgatcgttacagagggagtcacaggcgtgacgatagaggtggaggtggaggcggagggggttatcgtggcggtggtgggaggggtggggatgctgtgcccgatgctggggctactcgtttatatgtcggccgtctttctactcgtactagaggtcgagatttggaagaccttttcgcgaagtatgggagagttcgcgacgtggatgtgaagcacgactttgcctttgttgaatttgctgatgctcgagatgcggatgatgcaagacattatgtgaacggaaaagacttcgatggcaacaggctcattgtagagttcgcgaggaggggaccccgtggtgccccaggtggtgctcgagaatacctcggcagaggtccacctcctggcactggccgttgttataattgtggcaacgatggccattgggcaagagattgcaaagctggtgattggagggacaagtgttatcgatgcggacagcgggggcacattgagcgcaactgccgcaacagccccaggccaactagcagtccttctcttttccgctctcgctctcctagaggacaaaagagatcctcccggtaa

SEQ ID NO: 26 - protein, 198 aa, Physcomitrella patens
MSRYDDRYRGSHRRDDRGGGGGGGGYRGGGGRGGDAVPDAGATRLYVGRLSTRTRGRDLEDLFAKYGRVRDVDVKHDFAFVEFADARDADDARHYVNGKDFDGNRLIVEFARRGPRGAPGGAREYLGRGPPPGTGRCYNCGNDGHWARDCKAGDWRDKCYRCGQRGHIERNCRNSPRPTSSPSLFRSRSPRGQKRSSR

SEQ ID NO: 27 - DNA, 612 bp, Triticum turgidum
atgcctcgttatgatgatcgttatggaaacgcacgcttgtatgttggtagattgtcctcccgtactcgttcgcgcgacctagaatatcttttcagcaaatatggaagaatacgggaagtggaattgaagcgcgactatgcattcattgaatacagtgatcctcgtgatgctgatgaggcccgatacaacctagatggcagggatgttgatgggagccgcattattgttgagtttgctaaaggggttccacgtggttctggtggttcacgagaacgtgaatatgtgggaagagggcctcctccaggaacaggccgttgtttcaactgtggtattgatggtcattgggccagggactgcaaagctggtgactggaagaacaaatgctaccgctgtggagaaaggggccatattgaaagaaattgccagaatagcccgaggagtctcaggcgtgagagaagctattcacggtccccatctccacgtcgtggacgggctcgcagtcggagctacagcagaagccgtagttacagccgatctaggtccagatcctattctgaatctcccagagggcgccgcacagagcgtgatgagaggagatcaagggagcattag

SEQ ID NO: 28 - protein, 203 aa, Triticum turgidum
MPRYDDRYGNARLYVGRLSSRTRSRDLEYLFSKYGRIREVELKRDYAFIEYSDPRDADEARYNLDGRDVDGSRIIVEFAKGVPRGSGGSREREYVGRGPPPGTGRCFNCGIDGHWARDCKAGDWKNKCYRCGERGHIERNCQNSPRSLRRERSYSRSPSPRRGRARSRSYSRSRSYSRSRSRSYSESPRGRRTERDERRSREH

SEQ ID NO: 29 - DNA, 627 bp, Brassica rapa
atgcctcgatttgatgatcggtatggaaacactcgcctctacgttggccgcttgtcatctagaactcgtagcagggatcttgagcgtcttttcagcagatacggcagagtacgagatgttgatatgaagcgtgactatgcctttgttgaatttagcgatcctcgtgatgctgatgacgcaagatactacttagatggacgagacttcgatgggagtcgcatcactgttgaggcttccagaggggcacctcgtggttctcgggacagtggtagcagaggtccacctcctggttcgggtcgctgttttaactgtggtgttgatggtcattgggctagagactgcacagcaggtgactggaagaacaaatgttaccgctgtggtgaaagaggacacattgagagaaactgcaagaacagtcctagtcctaagaaggccaggcgtggtggaagctactccaggtcaccagttaaatcacgttctcctcgccgcagaagaagcccaagccgtagccgtagttacagtcgtggtcgtagctacagccgttcacgatcgccggtaagaagagagagaagcgttgaggatagatcacttagccccaaggcatggagcgatccgcatctcccatag

SEQ ID NO: 30 - protein, 208 aa, Brassica rapa
MPRFDDRYGNTRLYVGRLSSRTRSRDLERLFSRYGRVRDVDMKRDYAFVEFSDPRDADDARYYLDGRDFDGSRITVEASRGAPRGSRDSGSRGPPPGSGRCFNCGVDGHWARDCTAGDWKNKCYRCGERGHIERNCKNSPSPKKARRGGSYSRSPVKSRSPRRRRSPSRSRSYSRGRSYSRSRSPVRRERSVEDRSLSPKAWSDPHLP

SEQ ID NO: 31 - DNA, 627 bp, Oryza sativa
atgcctcgctatgatgaccgtgatcgctacgatgaccgttacggcggcaacacgaggctgtacgtaggtcgtctttcctcgcgcacccggacccgggaccttgaagaccttttcggcagatatgggagagtgcgatatgtggatatgaagcacgagtttgcatttgttgaatttagtgatgctcgggatgctgatgaggcaaggtacaacctggatggtcgggactttgatggaagccgcatgattgttgagtttgctaaaggggttccacgtggccctggaggatcacgtgaatatatgggcagaggaccaccacctggttctggccgctgctttaactgtgggattgatgggcactgggcccgtgactgcaaagctggagactggaaaaacagatgctatcggtgtggagacaggggccatatagaaagggactgccggaacagccctaagaatctcaagcgtggaagaagctactcaagatccccatcccctcgtcgtgggaggagccgtggtaggagctacagcaggagccgtagcaggagctacaggtatggaaaggaggatatcatttccttgatttcaacatgggaatctcttacttatcttatatgtgatcattattaa

SEQ ID NO: 32 - protein, 208 aa, Oryza sativa
MPRYDDRDRYDDRYGGNTRLYVGRLSSRTRTRDLEDLFGRYGRVRYVDMKHEFAFVEFSDARDADEARYNLDGRDFDGSRMIVEFAKGVPRGPGGSREYMGRGPPPGSGRCFNCGIDGHWARDCKAGDWKNRCYRCGDRGHIERDCRNSPKNLKRGRSYSRSPSPRRGRSRGRSYSRSRSRSYRYGKEDIISLISTWESLTYLICDHY

SEQ ID NO: 33 - DNA, 654 bp, Triticum aestivum
atgcctcgttatgatgatcgttatggaaacgcacgcttgtatgttggtagattgtcctcccgtactcgttcgcgcgacctagaatatcttttcagcaaatatggaagaatacgggaagtggaattgaagcgcgactatgcattcattgaatacagtgatcctcgtgatgctgatgaggcccgatacaacctagatggcagggatgttgatgggagccgcattattgttgagtttgctaaaggggttccacgtggttctggtggttcacgagaacgtgaatatgtgggaagagggcctcctccaggaacaggccgttgtttcaactgtggtattgatggtcattgggccagggactgcaaagctggtgactggaagaacaaatgctaccgctgtggagaaaggggccatatagaaagaaattgccagaatagcccgaggagtctcaggcgtgagagaagctattcacggtccccatctccacgtcgtggacgggctcgcagtcggagctacagcagaagccgtagttacagccgatctaggtccagatcctattctgaatctcccagagggcgccgcacagagcgtgatgagaggagatcaaggagcattagctacagcaggagccccaggcgatcactctccccaggaggctaa

SEQ ID NO: 34 - protein, 217 aa, Triticum aestivum
MPRYDDRYGNARLYVGRLSSRTRSRDLEYLFSKYGRIREVELKRDYAFIEYSDPRDADEARYNLDGRDVDGSRIIVEFAKGVPRGSGGSREREYVGRGPPPGTGRCFNCGIDGHWARDCKAGDWKNKCYRCGERGHIERNCQNSPRSLRRERSYSRSPSPRRGRARSRSYSRSRSYSRSRSRSYSESPRGRRTERDERRSRSISYSRSPRRSLSPGG

SEQ ID NO: 35 - DNA, 681 bp, Triticum aestivum
atgcctcgctacgatgagcgtgatcgttatggcggcaacacaaggctgtacgtgggtcgtcttccctcgcgcacccgcacaagggaccttgaagacctcttcggcagatatgggagagtgcgacatgtggatatgaagcatgagtttgcatttgttgagtttagtgatcccagggatgctgatgaagcaaggtacaatcttgatggtcgtgactttgatggaagccgcatgattgttgagtttgctaaaggggttccgcgtggccaaggaggaggaggtgaccgtgaccgtggccgtggcggtgaccgtgaatatatgggtcggggacctcctcctggttctggccgttgctttaactgtgggattgatgggcattgggctcgtgactgcaaagctggcgactggaaaaataggtgctatcgttgtggagatagtggccacatagaaagggattgccagaacagccctaagaacctcaagcgtggaaagagttactccagatctccatctcctcgccgtggaagggtgcgtgataggagctacagcaggagcccaatgaaggctgacagccctaataacatgagcccagctgcaaatggtcgtagcccgagccccagggacggcgaagacaatggcaaccaccgtgcacccagtggaagtgcatcacccggtggtggttga

SEQ ID NO: 36 - protein, 226 aa, Triticum aestivum
MPRYDERDRYGGNTRLYVGRLPSRTRTRDLEDLFGRYGRVRHVDMKHEFAFVEFSDPRDADEARYNLDGRDFDGSRMIVEFAKGVPRGQGGGGDRDRGRGGDREYMGRGPPPGSGRCFNCGIDGHWARDCKAGDWKNRCYRCGDSGHIERDCQNSPKNLKRGKSYSRSPSPRRGRVRDRSYSRSPMKADSPNNMSPAANGRSPSPRDGEDNGNHRAPSGSASPGGG

SEQ ID NO: 37 - DNA, 684 bp, Helianthus annuus
atgccgcgtcatgatgatcgctatggtagtactacacgtctctatgttggccacttggcttcacgaacccgatcgcgtgacttagaggacatattcagtcgatatggaagaatacgtcatgtggatatgaagcgtgattatgccttcgtggaattcagtgacccacgcgatgctgatgatgcacgatacagcttaaatggtcgtgatgtggatggaagccgtattgtggtggaattttcaaagggggttccacgaggtggtggcggtggtccctcaggtgggtcccgtgaatatcttggcagaggtcctccaccagggtcagggcgttgcttcaattgtggacttgatggccattgggctcgagattgcaaagctggcgactggaaaaacaaatgctaccgttgtggtgagcgaggccatatagaaaggcattgtcaaaacagccccaagaaagctgctcaaagcaggcgtggacgaagttactcgagaactccatctccagctcgacgtggtagaagccgcagtcgtagttatagcaggggtcgcagctacagccgatcaagatcaccttcaaggcgggagaggagcattgaccgtgcagatagaaagaagaggagtccaaggagacacgaggcttcaccatcaccatcccaaagggaggaaacgcagcccatcacctgctga

SEQ ID NO: 38 - protein, 227 aa, Helianthus annuus
MPRHDDRYGSTTRLYVGHLASRTRSRDLEDIFSRYGRIRHVDMKRDYAFVEFSDPRDADDARYSLNGRDVDGSRIVVEFSKGVPRGGGGGPSGGSREYLGRGPPPGSGRCFNCGLDGHWARDCKAGDWKNKCYRCGERGHIERHCQNSPKKAAQSRRGRSYSRTPSPARRGRSRSRSYSRGRSYSRSRSPSRRERSIDRADRKKRSPRRHEASPSPSQREETQPITC

SEQ ID NO: 39 - DNA, 684 bp, Prunus persica
atgcctcgacatgatgaccgccatggtggttcacggctctatgttggtcgcttgtcatcacggacaagatcacgcgaacttgaagatgtatttagcagatatggaagagtacgtgatgtggatatgaagcgcgactttgcctttgttgaatttagtgaccctcgggatgctgatgatgcaagatatagcctgaacggtcgggatgttgatgggagccgtctaattgtggaatttgcaaggggggcaccacggggtcctggcggatctcgtgagtatcttgggagagggcctccccctggatcaggacgctgtttcaattgtggacttgatgggcactgggctcgagattgcaaagctggggactggaagaataagtgttatcgatgtggagaacgagggcacattgaaagaaactgtcagaatagtccaaagaaaaccaaagggcgtagtcattcacgttcaccaagtccaaggcggggcagaagtcgaagccgtagttacagcaggggtcatagttacagtcgatccagatcacctgtgaggagagaaaggagtttggagagaagatcaaggagtcctcaagacagccggagccctaagaggcgtagggcttcaccaccaccatccaagggggaggaagcacgatcgtacacccgaagggaggagcccacgagtgaggggtag

SEQ ID NO: 40 - protein, 227 aa, Prunus persica
MPRHDDRHGGSRLYVGRLSSRTRSRELEDVFSRYGRVRDVDMKRDFAFVEFSDPRDADDARYSLNGRDVDGSRLIVEFARGAPRGPGGSREYLGRGPPPGSGRCFNCGLDGHWARDCKAGDWKNKCYRCGERGHIERNCQNSPKKTKGRSHSRSPSPRRGRSRSRSYSRGHSYSRSRSPVRRERSLERRSRSPQDSRSPKRRRASPPPSKGEEARSYTRREEPTSEG

SEQ ID NO: 41 - DNA, 702 bp, Euphorbia esula
atgccgcgatatgatgatcgttatgctaatactcgtctctatgttggacatcttgcctctcgtacaagatcacgagatcttgagtatcttttcagcaaatacggaagagtacgagatgtggatatgaagcgtgactatgcatttgttgaatttagtgatcctcgagatgctgatgatgcaagataccacctggatggcaaggattttgacgggagccgtataattgtggaatttgccaaaggggtacctcgcggttcccgggaatatttgggaaggggtcctcctccaggatctggacgttgctttaattgtggaatagatggtcactgggctcgtgattgcaaagctggggactggaagaataagtgttatcgctgtggagaaagaggccatattgagagaaactgcaagaacagtccaaagaaactcaaaggccggagttactccagatctcctgctaggtcaaggtcacactcaccacggcgaggcagaagccgtagcccaagctacagcagaggtcgcagctacagccggtcaagatctccagcaccaaagagagagagaagcattgagcgtgatgacaggaggaggtccctgagccctgagcctaagaatggggtgctctcaaagagcaggaagcgcagcccaacacctgatgtatggcagcccaagatcttctcccaagtcccggaaagtggatga

SEQ ID NO: 42 - protein, 233 aa, Euphorbia esula
MPRYDDRYANTRLYVGHLASRTRSRDLEYLFSKYGRVRDVDMKRDYAFVEFSDPRDADDARYHLDGKDFDGSRIIVEFAKGVPRGSREYLGRGPPPGSGRCFNCGIDGHWARDCKAGDWKNKCYRCGERGHIERNCKNSPKKLKGRSYSRSPARSRSHSPRRGRSRSPSYSRGRSYSRSRSPAPKRERSIERDDRRRSLSPEPKNGVLSKSRKRSPTPDVWQPKIFSQVPESG

SEQ ID NO: 43 - DNA, 711 bp, Brassica napus
atgcctcgatttgatgatcgatatggaaacactcgcctctacgtcggccgcttgtcatctagaactcgcagcagggatcttgagcgtcttttcagcagatacggaagagtacgagatgttgatatgaagcgtgactatgcctttgttgaatttagcgatcctcgtgatgctgatgacgcaagatactatttagatggacgagacttcgatgggagtcgcatcactgttgaggcttcaagaggggcacctcgtggttctcgggacagtggtagcagaggtccccctcctggttcgggtcgctgttttaactgcggtgttgatggtcattgggctagagactgcacagcaggtgactggaagaacaaatgttaccgctgtggtgaaagaggacacattgagagaaactgcaagaacagtcctagtcctaagaaggccaggcgtggtggaagctactccaggtcaccagttaaatcacgctcccctcgccgcagaagaagcccaagccggagccgtagttacagtcgtggtcgtagctacagccgttcacgatcgccagtgagaagagagagaagcgttgaggatagatcacttagtcctaaggcaaatggagcgatctgtatctcccagaggcaaagaccaaagcatgagtccagagcgaagggtcgtagatgcaagcccaaaacgggaaaagcaagaaggatcagactatga

SEQ ID NO: 44 - protein, 236 aa, Brassica napus
MPRFDDRYGNTRLYVGRLSSRTRSRDLERLFSRYGRVRDVDMKRDYAFVEFSDPRDADDARYYLDGRDFDGSRITVEASRGAPRGSRDSGSRGPPPGSGRCFNCGVDGHWARDCTAGDWKNKCYRCGERGHIERNCKNSPSPKKARRGGSYSRSPVKSRSPRRRRSPSRSRSYSRGRSYSRSRSPVRRERSVEDRSLSPKANGAICISQRQRPKHESRAKGRRCKPKTGKARRIRL

SEQ ID NO: 45 - DNA, 717 bp, Saccharum officinarum
  misc_feature (590)..(591): n is a, c, g, or t
atgcctcgctatgatgatcgctatgggaatacacgcttgtatgttggaagattggctccccgcacccgttcccgcgacctagaatatcttttcagcaaatatggaagaatacgtgaagtggagttgaagcgcgactatgcattcattgaattcagcgacccccaagatgctgatgatgcgcagtacaacctagatggcagggaagttgatggaagccggattattgttgaatttgctaaaggggttcctcgtggttctagtggttcacgtgaatatatgggaagaggagctccaccaggaacaggtcgttgttttaactgtggaattgatggtcactgggcaagagactgctacgctggtgactggaagaacaaatgttaccgctgtggcgaaaggggccatatagaaagaaattgccagaacagtccaatgaatctcaggcgtgagagaagctattcacgttctccatccccacgccgtggacggggccgccagcggagctacagcagaagccggagctataggtatgctcaggaaaggaaaccctcgtgttatttctctataagctctttggattcgttaggtgttanntattctttgttaatccttcatttctggttggtcaaccagcttgtgttaaccatccttctattacaatcaggcgaatccagtccccatctggatttccgaaggggtggacgccgtgaccgtgtatga

SEQ ID NO: 46 - protein, 238 aa, Saccharum officinarum
  misc_feature (197)..(197): Xaa can be any naturally occurring amino acid
MPRYDDRYGNTRLYVGRLAPRTRSRDLEYLFSKYGRIREVELKRDYAFIEFSDPQDADDAQYNLDGREVDGSRIIVEFAKGVPRGSSGSREYMGRGAPPGTGRCFNCGIDGHWARDCYAGDWKNKCYRCGERGHIERNCQNSPMNLRRERSYSRSPSPRRGRGRQRSYSRSRSYRYAQERKPSCYFSISSLDSLGVXYSLLILHFWLVNQLVLTILLLQSGESSPHLDFRRGGRRDRV

SEQ ID NO: 47 - DNA, 717 bp, Solanum tuberosum
atgcctcgttatgatgatcggatgggaaatagcactcgtctctatgtgggacacttgtcttcacggacccgttcacgtgatctggagcgtgcgttcagtaaatatgggagagtacgggatgtggacatgaagcacgactatgccttcgtagaatttagtgatcctcgagatgctgatgatgcaagatactatttagatggccgtgacattgatggacgccgcataattgttgaatttgccaagggagtgccacgtggaccaggcggttcgcgcgagtatcttggcaaaggacccgctcctgggtcaggccgctgcttcaactgtggccttgaaggtcactgggctcgagattgcaaagctggggattggaagaacaagtgttatcgatgtggagaaagaggtcacatagaaaggaaatgcccaaatagtcctaaaaaagtcagagacgcagctactcacggtcgcctgttaggtcaaagtcacgctcacgttcacgttctcctcgtcgaagttatagcagaagtcgcagctatagtcaatcaagatccccgccaccaaagagagaacaagtggaccaggtcaagcgatcaagaagctacagtaggagcccggagccaaggaaggctagtccaagccctccacccaagactaggaagcgcagcccaacacctgaagagggaagcccgatggaagcaaagagccctccttcaccaatga

SEQ ID NO: 48 - protein, 238 aa, Solanum tuberosum
MPRYDDRMGNSTRLYVGHLSSRTRSRDLERAFSKYGRVRDVDMKHDYAFVEFSDPRDADDARYYLDGRDIDGRRIIVEFAKGVPRGPGGSREYLGKGPAPGSGRCFNCGLEGHWARDCKAGDWKNKCYRCGERGHIERKCPNSPKKVRDAATHGRLLGQSHAHVHVLLVEVIAEVAAIVNQDPRHQRENKWTRSSDQEATVGARSQGRLVQALHPRLGSAAQHLKREARWKQRALLHQ

SEQ ID NO: 49 - DNA, 723 bp, Lactuca sativa
atgcctcgttatgatgatcgccatggcagcactcgtctctatgttggccacctggcttcacgtacaagatcgcgtgatttggaagacatttttagcagatatggaagaatacgcgatgtggatatgaagcgcggctttgcctttgtggaattcagcgatgcaagagatgctgatgatgcaagatatagcttaaatggtcgtgatgttgatggaagccgaatagtggtggagtttgctaaaggggctccacgtggcggtggcggcggcgggcgtgatggtggtggtcgtgacggtggtggccgtgatggtggttctcgtgagtttcttgggagaggtcctccaccggggtcagggcggtgctttaattgtgggcttgatgggcattgggctcgtgactgtaaagctggtgattggaagaacaaatgctatcgatgtggtgaacgtggtcatatagaaaggaattgtcaaaatagcccaaagaaagtcaatgctgatagcaggcgtggaagaagttactcgcggaccccatcgccacctaggcgtggaagaagccgcagtcgtagttttagcaggagtcgcagctacagccaatcaaggtcacctgtagagcgggagagggagagagagagagaaagagagagtattattaataactttgaatcatgttgtctttctgcaaactttatgcaagtacctaaatggcagtcgtgcctctatttgtag

SEQ ID NO: 50 - protein, 240 aa, Lactuca sativa
MPRYDDRHGSTRLYVGHLASRTRSRDLEDIFSRYGRIRDVDMKRGFAFVEFSDARDADDARYSLNGRDVDGSRIVVEFAKGAPRGGGGGGRDGGGRDGGGRDGGSREFLGRGPPPGSGRCFNCGLDGHWARDCKAGDWKNKCYRCGERGHIERNCQNSPKKVNADSRRGRSYSRTPSPPRRGRSRSRSFSRSRSYSQSRSPVERERERERERESIINNFESCCLSANFMQVPKWQSCLYL

SEQ ID NO: 51 - DNA, 726 bp, Citrus sinensis
atgcctcgttatgatgaccggtacggtggtacgcgtctctatgttggccgcttggcttcacggacaagatcacgcgatcttgaggagatcttcagcagatatgggagaattcgcgatgtggatatgaagcgtgacttcgcctttgttgaatttagcgaccctcgcgatgctgacgatgcaagatatagcttaaatggtcgggatgttgatggaagccgtatcattgtggaatttgcaagaggggggccacgtggtcctggtggatctcgtgagtatcttggtcgaggccctcctcctggatctgggcgctgcttcaattgtgggattgatggccattgggctcgagactgcaaggctggagactggaagaataagtgttatcgctgtggtgaacgaggccacatagaacgaaattgtcaaaacagtccaaagaagttaaggaggcctcggagttattcacgttctccaagtcctcgtcgtggtagaagcaggagccgtagttacagtagaggccgcagcgacagccgatcacgatcgcctgtaaagagagataggagtgttgaacgttttgagagaagaacaaggagcccccgagacagtaggagccctaagcgtcgcagaaattcaccaccatcatctaaaggtaggaagcgtagtccaaccccagatgaaagaagtccacaagatcaacgtagcccatccccaagggacccggaggcaggctaa

SEQ ID NO: 52 - protein, 241 aa, Citrus sinensis
MPRYDDRYGGTRLYVGRLASRTRSRDLEEIFSRYGRIRDVDMKRDFAFVEFSDPRDADDARYSLNGRDVDGSRIIVEFARGGPRGPGGSREYLGRGPPPGSGRCFNCGIDGHWARDCKAGDWKNKCYRCGERGHIERNCQNSPKKLRRPRSYSRSPSPRRGRSRSRSYSRGRSDSRSRSPVKRDRSVERFERRTRSPRDSRSPKRRRNSPPSSKGRKRSPTPDERSPQDQRSPSPRDPEAG

SEQ ID NO: 53 - DNA, 726 bp, Gossypium hirsutum
atgcctaggtatgatgaccgacgcggtggcactcgtttgtatgttggtcatttgtcttcaaggacaagatcacgtgatctagaggacatgtttagcagatatgggagagtacgtgatgtggatatgaagcgtgactatgcatttgttgaattcagtgatcctagagatgccgatgatgcaagatatgcattgaatggtcgagacatggatggaagccggatgattgttgaatttgccaaaggagtgccccgtggttcaggtggatctcgagattaccctggaagaggccccactcctgggtcaggacgctgcttcaactgtggaattgatggtcattgggctcgtgattgcaaagccggggattggaagaataagtgttaccgctgtggagaacgaggccatatagaaagaaattgtcaaaacagtccaaagaaactaagccgcagaccacgcagttactctcgctcacctagcccctaccgtggtagaagcagaagccgcagttacagcaggggacgcagcgacagtagatcaagatcacctgtgaagagagaccgaagttacgagcgcgaggatagaatatcaaggagccctaagcgccacaagggttctccatcaccatctcaagggaggaagcatagtccagcacccaatgaaagaaggcccccagagggggggcggtccttcccccaaggactgcagggctgcaaatggttcggattatag

SEQ ID NO: 54 - protein, 241 aa, Gossypium hirsutum
MPRYDDRRGGTRLYVGHLSSRTRSRDLEDMFSRYGRVRDVDMKRDYAFVEFSDPRDADDARYALNGRDMDGSRMIVEFAKGVPRGSGGSRDYPGRGPTPGSGRCFNCGIDGHWARDCKAGDWKNKCYRCGERGHIERNCQNSPKKLSRRPRSYSRSPSPYRGRSRSRSYSRGRSDSRSRSPVKRDRSYEREDRISRSPKRHKGSPSPSQGRKHSPAPNERRPPEGGRSFPQGLQGCKWFGL

SEQ ID NO: 55 - DNA, 735 bp, Lactuca sativa
atgcctcgctatgatgatcgccatggcagcactcgtctctatgttggccacctggcttcacgtacaagatcgcgtgatttggaagacatttttagcagatatggaagaatacgcgatgtggatatgaagcgcgactttgcctttgtggaattcagcgatgcaagagatgctgatgatgcaagatatagcttaaatggtcgtgatgttgatggaagccgaatagtggtggagtttgctaaaggggctccacgtggcggtggcggcggcgggcgtgatggtggtggtcgtgacggtggtggccgtgatggtggttctcgtgagtttcttgggagaggtcctccaccggggtcagggcggtgctttaattgtgggcttgatgggcattgggctcgtgactgtaaagctggtgattggaagaacaaatgctatcgatgtggtgaacgtggtcatatagaaaggaattgtcaaaatagcccaaagaaagtcaatgctgatagcaggcgtggaagaagttactcgcggaccccatcgccacctaggcgtggaagaagccgcagtcgtagttttagcaggagtcgcagctacagccaatcaaggtcacctgtaaagcgggagagggagagagagaggagcattgaacgtgcagaaagaagatcgagaagcccaaggagacacagggggggcttcaccaccaccatcgaaagggaggaagcgcaacaccagcccatcgcctga

SEQ ID NO: 56 - protein, 244 aa, Lactuca sativa
MPRYDDRHGSTRLYVGHLASRTRSRDLEDIFSRYGRIRDVDMKRDFAFVEFSDARDADDARYSLNGRDVDGSRIVVEFAKGAPRGGGGGGRDGGGRDGGGRDGGSREFLGRGPPPGSGRCFNCGLDGHWARDCKAGDWKNKCYRCGERGHIERNCQNSPKKVNADSRRGRSYSRTPSPPRRGRSRSRSFSRSRSYSQSRSPVKRERERERSIERAERRSRSPRRHRGGFTTTIEREEAQHQPIA

SEQ ID NO: 57 - DNA, 753 bp, Glycine max
atgcctcgctatgatgataaatacggcaatacccgcctctatgtgggacacttgtcttcgaggactcgttcccgtgatctggagcgtgcctttagcagatatggaagagttcgaggtgtggatatgaagaatgatttcgcttttgttgattttagtgatcctcgagatgctgatgatgcaagatataacctggatggtcgggatgttgatggaagtcggattattgtggaatttgcaaaaggggctcctcgtgggtcccgggaatatttggggcgaggtcctcctcctggctctggacgctgcttcaattgtggccttgatggccattgggcacgggattgcaaagctggggattggaagaataagtgttaccgctgtggggagagaggacatatagaaaggaactgcaagaacagccccaaaaaattgagcaccaggcgaggacggagttattcacgctcaccagtcaggtcacgttcacctcatcgcggcagaagccgtgatcgcagttacagccgagatcgcagctacagtcgatcacgatcccctgtcagaagagaagaaagccctgttcgggaagataggtcacaaagccctgatcacaaaaatagtcctcagccctccaagacaaggaagcatagtccatcacctgaccgtagcccacagaaaagaggtgacacatctcccgacaatgataggttgagtagaagccctgcaagggaccctgaagataggggcagcgagtcaccttaa

SEQ ID NO: 58 - protein, 250 aa, Glycine max
MPRYDDKYGNTRLYVGHLSSRTRSRDLERAFSRYGRVRGVDMKNDFAFVDFSDPRDADDARYNLDGRDVDGSRIIVEFAKGAPRGSREYLGRGPPPGSGRCFNCGLDGHWARDCKAGDWKNKCYRCGERGHIERNCKNSPKKLSTRRGRSYSRSPVRSRSPHRGRSRDRSYSRDRSYSRSRSPVRREESPVREDRSQSPDHKNSPQPSKTRKHSPSPDRSPQKRGDTSPDNDRLSRSPARDPEDRGSESP

SEQ ID NO: 59 - DNA, 765 bp, Panicum virgatum
atgcctcgatacgatgaccgctatgattacgatgatcgatacgaccactatggtcgacatggtggtaacaccaagttgtacgtgggtcagatttctcctcatactcagatacatgatcttgaggaccttttcagcaaatatgggagactgcggaaagtggatctgaagagggactttggctttgttgagtttagtgatcctcgggatgccgatgacgcaaggtatgatcttgatggccgaaaatttgatgggagttgtatcgttgttgagtttgcaagaggggtcccgcgtggtccaggaggtgtccgccaatatggcagaggacctcctggccgctgctataactgtgggatggatgggcactgggttcgtgattgcaaagctagtgactggcgggataggtgctaccgctgtggagaaatgggccatctagaaagaaactgccagaacagtccaaaggatctgaagcgagacagacgctactcaaggtctccatctcctcgccatggaaagggccaagggagaagcagaagctactcaaggtctccgtctcctcgtcatgcaaggggccgaagctggacgtacagtaggtcgccaccgccaaggagggattacaacactggtggggaagagttgccgtcaaaaagcgcccattacagccccaaccccaggaggaacctcccaccaagggaacaagctgaacgcaatggctcatatcatggtgggagccccagaagaggtgaagctcgtgagaagcgccagtga

SEQ ID NO: 60 - protein, 254 aa, Panicum virgatum
MPRYDDRYDYDDRYDHYGRHGGNTKLYVGQISPHTQIHDLEDLFSKYGRLRKVDLKRDFGFVEFSDPRDADDARYDLDGRKFDGSCIVVEFARGVPRGPGGVRQYGRGPPGRCYNCGMDGHWVRDCKASDWRDRCYRCGEMGHLERNCQNSPKDLKRDRRYSRSPSPRHGKGQGRSRSYSRSPSPRHARGRSWTYSRSPPPRRDYNTGGEELPSKSAHYSPNPRRNLPPREQAERNGSYHGGSPRRGEAREKRQ

SEQ ID NO: 61 - DNA, 792 bp, Brassica napus
atgcctcgttatgaagatcgtcacggaagcacaagactctatgttggccacttgtcctcccgaactcggactcgtgatgttgaacgtctctttagcaaatatggaagagtacgagatgttgatatgaagcgtgactttgcctttgtcgattttagcgacccccgagatgctgatgatgcaaggtaccgcttagacggaagggacgttgatggaagccgcatcgttgttgaatttgccaaagggacaccgcgtggttctggttctggctatggttctcgtgagatatcttcaagcagaggaggacctcctcctccaggaagtggacgctgcttcaactgtggtcttgatggacactgggctagagattgcactgctggtgactggaagaacaaatgttatcgatgtggcgatagaggtcacattgagaggaactgcaagaacagtcccaagaagctcaagcgggaccaaagttactccagatcaccagttaggtctcggtcacctcctcgtcctagtagaagaaaccgcagcagaagcaaaagcccaagctacagtcgctcaagatccccggttaggactgaaaaggctcggactcctgaaccagctgcgaggagcaggagccctgaaccaacggttgttaactctcctccactcaaggatataaaccatagcctaagtcctaacgaaaagagcccagtgcctgagaagaacggtcaaagccctaaaggtcaagagaacggcaatggaaccaatggacaagaccacagtcctagagacgaacctagtccctga

SEQ ID NO: 62 - protein, 263 aa, Brassica napus
MPRYEDRHGSTRLYVGHLSSRTRTRDVERLFSKYGRVRDVDMKRDFAFVDFSDPRDADDARYRLDGRDVDGSRIVVEFAKGTPRGSGSGYGSREISSSRGGPPPPGSGRCFNCGLDGHWARDCTAGDWKNKCYRCGDRGHIERNCKNSPKKLKRDQSYSRSPVRSRSPPRPSRRNRSRSKSPSYSRSRSPVRTEKARTPEPAARSRSPEPTVVNSPPLKDINHSLSPNEKSPVPEKNGQSPKGQENGNGTNGQDHSPRDEPSP

SEQ ID NO: 63 - DNA, 798 bp, Brassica napus
atgcctcgttatgaagatcgtcacggaagcacgcgactctacgttggccacttgtcttctcgaacgcggactcgtgatgttgaacgtctctttagcaaatatggaagagtacgagatgttgatatgaagcgtgactttgcctttgtcgattttagcgacccccgagatgctgatgatgcaaggtaccgcttagacggaagggacgttgatggaagccgcatcgttgttgaatttgctaaagggacaccgcgtggttctggttctggttatggttctcgtgagatatcttcaagcagaggaggacctcctcctccaggaagcggacgctgcttcaactgtggtcttgatggacactgggctagagactgcactgctggtgactggaagaacaaatgttatcgatgtggcgatagaggtcacattgagaggaactgcaagaacagtcccaagaagctcaagcgggaccaaagttactccagatcaccagttaggtctccatctcctcctcgtcgtagtagaagaaaccgcagcagaagcagaagcagaagcccaagctacagtcgctcaagatccccggttaggactgaaaaggctcggactcctgaaccagctgtgaggagcaggagccctgagccaacggttgttaactcacctccactcaaggatagaaaccatagcctaagtcctaatgaaaagagcccaatgcctgagaagaacggtcaaagccctaaagatcaagagaacggcaatggaaccaatggacaagaccacagtcctagagacgaacccagtccctga

SEQ ID NO: 64 - protein, 265 aa, Brassica napus
MPRYEDRHGSTRLYVGHLSSRTRTRDVERLFSKYGRVRDVDMKRDFAFVDFSDPRDADDARYRLDGRDVDGSRIVVEFAKGTPRGSGSGYGSREISSSRGGPPPPGSGRCFNCGLDGHWARDCTAGDWKNKCYRCGDRGHIERNCKNSPKKLKRDQSYSRSPVRSPSPPRRSRRNRSRSRSRSPSYSRSRSPVRTEKARTPEPAVRSRSPEPTVVNSPPLKDRNHSLSPNEKSPMPEKNGQSPKDQENGNGTNGQDHSPRDEPSP

SEQ ID NO: 65 - DNA, 801 bp, Citrus clementina
  misc_feature (774)..(774): n is a, c, g, or t
atgcctcgttatgatgaccggtacggtggtacgcgtctctatgttggccgcttggcttcacggacaagatcacgcgatcttgaggagatcttcagcagatatgggagaattcgcgatgtggatatgaagcgtgacttcgcctttgttgaatttagcgaccctcgcgatgctgacgatgcaagatatagcttaaatggtcgggatgttgatggaagccgtatcattgtggaatttgcaagaggggggccacgtggtcctggtggatctcgtgagtatcttggtcgaggccctcctcctggatctgggcgctgcttcaattgtgggattgatggccattgggctcgagactgcaaggctggagactggaagaataagtgttatcgctgtggtgaacgaggccacatagaacgaaattgtcaaaacagtccaaagaagttaaggaggcctcggagttattcacgttctccaagtcctcgtcgtggtagaagcaggagccgtagttacagtagaggccgcagcgacagccgatcacgatcgcctgtaaagagagataggagtgttgaacgttttgagagaagaacaaggagcccccgagacagtaggagccctaagcgtcgcagaaattcaccaccatcatctaaaggtaggaagcgtagtccaaccccagatgaaagaagtccacaagatcaacgtagcccatccccaagggaccggaggcaggctaatggatcagagtacagtggcagtcccaggggaaagagcagaaccctgtangaccatgccgaaggcctggaggaatag

SEQ ID NO: 66 - protein, 266 aa, Citrus clementina
  misc_feature (258)..(258): Xaa can be any naturally occurring amino acid
MPRYDDRYGGTRLYVGRLASRTRSRDLEEIFSRYGRIRDVDMKRDFAFVEFSDPRDADDARYSLNGRDVDGSRIIVEFARGGPRGPGGSREYLGRGPPPGSGRCFNCGIDGHWARDCKAGDWKNKCYRCGERGHIERNCQNSPKKLRRPRSYSRSPSPRRGRSRSRSYSRGRSDSRSRSPVKRDRSVERFERRTRSPRDSRSPKRRRNSPPSSKGRKRSPTPDERSPQDQRSPSPRDRRQANGSEYSGSPRGKSRTLXDHAEGLEE

SEQ ID NO: 67 - DNA, 813 bp, Nicotiana tabacum
atgccgcggtatgatgataggtatggtggtacacgcctctatgttggacatttgtcttccagaacgcgatctcgagacttggaggacgtcttcagcagatacgggagagtacgtgatgtggatatgaagcgtgactatgcttttgtggaatttagtgatcctcgagatgctgatgatgcaagatatggcctaaatgggcgagacgttgatggaagccgtattactgtggaattcgcaaaaggggtacctcgtggtccaggtggatctcgagagtttggcggcagaggtcctcctccaggtacaggtcgttgctttaattgtggacttgatggccattgggctcgagattgtaaggctggggactggaagaacaagtgttaccgctgtggggagcgaggtcatatagaaagaaactgtcagaatagccccaagaaattgaaacgtggacgaagttattcccgctcaccgtctcctcgtcgtggcagaagtcgcagccacagttacagcagaggtcgtagctacagccgatccaggtctcctgtgaggagggactccaggtctcctgtgaagagcgactccaggtctcctgtgaagagggaccgtagcattgagcatgaagaaagaagatcaagaagtcctcgccctcatagatcatcaccacctccatcaaaaggaagaaatacagcccttcacctgatgaaagagtccacaagagagagtacgccgtcccctagggtgataggcagccaatggtctgatcatagcaggagccctacgacgatgctgatagacgacgcagaattgagtctatga

SEQ ID NO: 68 - protein, 270 aa, Nicotiana tabacum
MPRYDDRYGGTRLYVGHLSSRTRSRDLEDVFSRYGRVRDVDMKRDYAFVEFSDPRDADDARYGLNGRDVDGSRITVEFAKGVPRGPGGSREFGGRGPPPGTGRCFNCGLDGHWARDCKAGDWKNKCYRCGERGHIERNCQNSPKKLKRGRSYSRSPSPRRGRSRSHSYSRGRSYSRSRSPVRRDSRSPVKSDSRSPVKRDRSIEHEERRSRSPRPHRSSPPPSKGRNTALHLMKESTRESTPSPRVIGSQWSDHSRSPTTMLIDDAELSL

SEQ ID NO: 69 - DNA, 825 bp, Triticum aestivum
atgcctcgctacgatgagcgtgatcgttacggtggcaacacaaggctgtacgtgggtcgtcttccctcgcgcacccgcacaagggacctcgaagacctcttcggcagatatgggagagtgcgacatgtggatatgaagcacgagtttgcatttgttgagtttagtgatcccagggatgctgatgaagcaaggtacaatcttgatggtcgtgactttgatggaagccgcatgattgttgagtttgctaaaggggttccgcgtggccaaggaggaggaggtgaccgtgaccgtggtggccgtggtggtgaccgtgaatatatgggtcggggacctcctcctggttctgggcgttgctttaactgtgggattgatgggcattgggctcgggactgcaaagctggcgactggaaaaacaggtgctatcgttgtggagatagtggccacatagaaagggattgtcagaacagccctaagaacctcaagcgtggaaagagttactccagatctccatctcctcgccgcggaagggtgcgtgataggagctacagcaggagcccccgtggcagtcgcagccctatgaggagcccccgtgacagtcgcagccctaggaggagtgcttcacctgccaaggggagggcccggagccccacccctcctggcagcaggagccctgcaccaagggataacagcaggagcccaatgaaggctgacagccctaaaaacatgagcccagctgccaatggtcgtagcctgagccccagggacggcgaagacaatggccaccaccgtgcacccagtggaagtgcatcacccggtggtggttag

SEQ ID NO: 70 - protein, 274 aa, Triticum aestivum
MPRYDERDRYGGNTRLYVGRLPSRTRTRDLEDLFGRYGRVRHVDMKHEFAFVEFSDPRDADEARYNLDGRDFDGSRMIVEFAKGVPRGQGGGGDRDRGGRGGDREYMGRGPPPGSGRCFNCGIDGHWARDCKAGDWKNRCYRCGDSGHIERDCQNSPKNLKRGKSYSRSPSPRRGRVRDRSYSRSPRGSRSPMRSPRDSRSPRRSASPAKGRARSPTPPGSRSPAPRDNSRSPMKADSPKNMSPAANGRSLSPRDGEDNGHHRAPSGSASPGGG

SEQ ID NO: 71 - DNA, 837 bp, Nicotiana benthamiana
atgccgcggtatgatgataggtatggtggtacacgcctctatgttggacatttgtcttccagaacgcgatctcgagacttggaggatgtcttcagcagatacgggagagtacgtgatgtggatatgaagcgtgactatgcttttgtggaatttagtgatcctcgagatgctgatgatgcaagatatggcctaaatgggcgggatgttgatggaagccgtattactgtggaatttgcaaaaggggtacctcgtggtccaggtggatctcgagagtttggcggcagaggtcctcctccaggtacaggccgttgctttaattgtggacttgatggccattgggctcgagattgtaaggctggggactggaagaacaagtgttaccgctgtggggagcgaggtcatatagaaagaaactgtcagaatagccccaagaaattggaacgtggacgaagttattcccgctcaccgtctcctcgtcatggcagaagtcgcagtcgcagccgcagttacagcggaggtcgtagctacagccgatccaggtctcctgtgaggagagactccaggtctcctgtgaagagggaccgtagcattgagcatgaagagagaaaatcaagaagtcctcgccctcgtagatcatcaccacctccatcaaaaggaaggaaatacagcccttcacctgataaaagaagtccacaagagagaggtacgccgtcccctaagggtgatagggcagccaatggttctgagtatagcaggagccctacagacgatgctggaatagacgaacacagaaatttgagtcctattgaaagaaaatggccgcagtcgcagcaatag

SEQ ID NO: 72 - protein, 278 aa, Nicotiana benthamiana
MPRYDDRYGGTRLYVGHLSSRTRSRDLEDVFSRYGRVRDVDMKRDYAFVEFSDPRDADDARYGLNGRDVDGSRITVEFAKGVPRGPGGSREFGGRGPPPGTGRCFNCGLDGHWARDCKAGDWKNKCYRCGERGHIERNCQNSPKKLERGRSYSRSPSPRHGRSRSRSRSYSGGRSYSRSRSPVRRDSRSPVKRDRSIEHEERKSRSPRPRRSSPPPSKGRKYSPSPDKRSPQERGTPSPKGDRAANGSEYSRSPTDDAGIDEHRNLSPIERKWPQSQQ

SEQ ID NO: 73 - DNA, 849 bp, Hordeum vulgare
atgccccggtatgacgaccgttacgatcgctatgatgaccgttatgatcgttacgacgaccgttacgatcgctataatgaccgttatgatcggtatgaccaatatggtggcaacaccaagttgtacgtgggccatctttctacccacacccggaccaaggatgttgagtaccttttcggcagatatgggagaatacgatgtgtggagctgaagcatgattatggctttgttgagtttagcaatccccgggatgcagatgatgcaaggtatgagcttgatggccaagatgttgacgggagccgtatcattgttgagtttgcaagagggaccccgcgtggcccaggaggttcccgcgagtacttgggcagaggacctcctcctggttctggccgctgctttaactgtgggattgatgggcactgggctcgtgactgcaatgctggcgactggaaaaataagtgttatcgctgtggagaaaagggccatatagaaaaaaactgccagaacagtcctaagaatctcaagcggggaagaagctactcacgctccccaccaccttatcgtggaatgagccgaagcaggagttacagccgatcgccttatacaaggagggatgattgtgccgttggccatgaggaaaggcgaccaagaagctctagttacagtcctaggaggagtgcttcaccttccggtttgaaccgcagcccagcaccaaatggcaagagccacccaccaagggagcaagctgaagtcaatggtttacataacggtgtgagaggcaacagcctgagtccagctcgtgatagccgccctgccactaacggaaggagccccagcgcgtgggagtga

SEQ ID NO: 74 - protein, 282 aa, Hordeum vulgare
MPRYDDRYDRYDDRYDRYDDRYDRYNDRYDRYDQYGGNTKLYVGHLSTHTRTKDVEYLFGRYGRIRCVELKHDYGFVEFSNPRDADDARYELDGQDVDGSRIIVEFARGTPRGPGGSREYLGRGPPPGSGRCFNCGIDGHWARDCNAGDWKNKCYRCGEKGHIEKNCQNSPKNLKRGRSYSRSPPPYRGMSRSRSYSRSPYTRRDDCAVGHEERRPRSSSYSPRRSASPSGLNRSPAPNGKSHPPREQAEVNGLHNGVRGNSLSPARDSRPATNGRSPSAWE

SEQ ID NO: 75 - DNA, 849 bp, Saccharum officinarum
atgcctcgctacgatgatcgctatgggaatacacgcttgtatgttggaagattggctccccgcacccgttcccgcgacctagaatatcttttcagcaaatatggaagaatacgtgaagtggagttgaagcgcgactatgcattcattgaattcagcgacccccaagatgctgatgatgcgcagtacaacctagatggcagggaagttgatggaagccggattattgttgaatttgctaaaggggttcctcgtgcttctagtggttcacgtgaatatatgggaagaggacctccaccaggaacaggtcgttgttttaactgtggaattgatggtcactgggcaagagactgcaaggctggtgactggaaaaacaaatgttaccgctgtggcgaaaggggacatatagaaagaaattgccagaacagtccaaggaatctcaggcgtgagagaagctactcacgttctccatccccacgccgtggacggggccgcagccggagctacagcagaagccagagctatagccgatccagggccccatctggatctcccgaggggttgcacgccggtgaccgtgaccaagaggagaatcaaggagtggttagcttccagcaggagccgcaggccctaggcggttctgtcttaccctgcaaaggaaaaagaaccgcacccgcacaccttgtggcagcaaggaaccccaaagagcccccaccccaagggatggatgtgaagccccccacccaagggttatggtgcccagcaacggtttataaccttgaaaaaaagcctcggggccccgggaaaaccgcaaggaggagttcgggcgcccttctgtttgggcttccgtaa

SEQ ID NO: 76 - protein, 282 aa, Saccharum officinarum
MPRYDDRYGNTRLYVGRLAPRTRSRDLEYLFSKYGRIREVELKRDYAFIEFSDPQDADDAQYNLDGREVDGSRIIVEFAKGVPRASSGSREYMGRGPPPGTGRCFNCGIDGHWARDCKAGDWKNKCYRCGERGHIERNCQNSPRNLRRERSYSRSPSPRRGRGRSRSYSRSQSYSRSRAPSGSPEGLHAGDRDQEENQGVVSFQQEPQALGGSVLPCKGKRTAPAHLVAARNPKEPPPQGMDVKPPTQGLWCPATVYNLEKKPRGPGKTARRSSGALLFGLP

SEQ ID NO: 77 - DNA, 849 bp, Triticum aestivum
atgcctcgctatgatgaccgttacgatcgctacgatgaccgttatgatcgttatgacgaccgttttgatcgctataatgaccgttatgatcggtatgaccgatatggtggcaacaccaagttgtacgtgggccatctttctacgcacacccggaccaaggatgttgagtaccttttcggcagatatgggagaatacgatgtgtggagctgaagtatgattatggcttcgttgagtttagcgatccccgggatgcagatgatgcaaggtatgagcttgatggccaagagattgatgggagccgcatcattgttgagtttgcaagagggatcccgcgtggcccaggaggttcccgcgagtacttgggcagaggaccccctcctggttctggccgctgctttaactgtgggattgatgggcactgggctcgtgactgcaatgctggcgactggaaaaataagtgctatcgctgtggagaaaagggccatatagaaaaaaactgccagaacagtcctaagaatatcaagcggggaagaagctactcacgctccccaccacctcatcgcgaaaggagcctaagcaggagttacagccgatcgccttatccaaggagggatgatcgagctgttggccatgaggaaaggcgaccaagaagctctagttacagccctaggaggagtgcttcaccttccggtttgaaccgcagcccagcaccaaatggcaagagccacccaccaaaggagcaagctgaagtcaatggttcacataacggtgtgagaggcaacagcctgagtcccgcccgtgatagccgcccagccaccaacagaatgagccctagcccctgggagtga

SEQ ID NO: 78 - protein, 282 aa, Triticum aestivum
MPRYDDRYDRYDDRYDRYDDRFDRYNDRYDRYDRYGGNTKLYVGHLSTHTRTKDVEYLFGRYGRIRCVELKYDYGFVEFSDPRDADDARYELDGQEIDGSRIIVEFARGIPRGPGGSREYLGRGPPPGSGRCFNCGIDGHWARDCNAGDWKNKCYRCGEKGHIEKNCQNSPKNIKRGRSYSRSPPPHRERSLSRSYSRSPYPRRDDRAVGHEERRPRSSSYSPRRSASPSGLNRSPAPNGKSHPPKEQAEVNGSHNGVRGNSLSPARDSRPATNRMSPSPWE

SEQ ID NO: 79 - DNA, 852 bp, Brassica napus
atgcctcgatttgatgatcgatatggaaacactcgcctctacgttggccgcttgtcatctagaactcgtagcagggatcttgagcgtcttttcagcagatacggaagagtacgagatgttgatatgaagcgtgactatgcctttgttgagtttagcgatcctcgtgatgctgatgacgcaagatactacttagatggacgagacttcgatggaagtcgcatcactgtggaggcttccagaggggcacctcgtggttctcgggacagtggtagcagaggtccgcctcctggttctggtcgctgttttaactgcggtgttgatggtcattgggctagagactgcacagcaggtgactggaagaacaaatgttaccgctgtggtgaaagaggacacattgagagaaactgcaagaacagtcctagtcctaagaaggccaggcgtggtggaagctactccaggtcaccagttaaatcacgctcccctcgccgcagaagaagcccaagccggagccgtagttacagtcgtggtcgtagctacagtcgttcacgatcgccagtgagaagagagagaagcgttgaggatagatcacttagtcctaagccaatggagcgatccgtatctcccataggcaaagaccaaagcctgagtccagaccgaagagtcgtagatgcaagcccaaaactagaaaagcaagatgggtcggactatgaaggcagcccaagagaaaatggtaatggcaagagctctgtgagtcccattgcgggaggtgaagaaagtcctcaagacaggagccccgttgatgatgagcctgagcttaaccgttcttcccctaaaggcagcgagtcaccttga

SEQ ID NO: 80 - protein, 283 aa, Brassica napus
MPRFDDRYGNTRLYVGRLSSRTRSRDLERLFSRYGRVRDVDMKRDYAFVEFSDPRDADDARYYLDGRDFDGSRITVEASRGAPRGSRDSGSRGPPPGSGRCFNCGVDGHWARDCTAGDWKNKCYRCGERGHIERNCKNSPSPKKARRGGSYSRSPVKSRSPRRRRSPSRSRSYSRGRSYSRSRSPVRRERSVEDRSLSPKPMERSVSPIGKDQSLSPDRRVVDASPKLEKQDGSDYEGSPRENGNGKSSVSPIAGGEESPQDRSPVDDEPELNRSSPKGSESP

SEQ ID NO: 81 - DNA, 855 bp, Arabidopsis lyrata
atgcctcgctatgatgatcgctatggaaacactcgcctctatgttggtcgcttgtcatctagaactcgtgccagagaccttgaacgtctatttagcagatacggaagagtacgtgatgtggatatgaagcgtgattatgcctttgttgaatttagtgatcctcgtgatgctgatgacgcaagatattacttggatggacgggatttcgatggaagtcgcatcactgtggaggcatcaagaggggcgcctcgtggttctcgggacaatggtagcagaggccctcctcctggttctggtcgctgttttaattgtggtgttgatggtcactgggcccgagactgcacagcaggagactggaagaataaatgttaccgctgtggagaaagaggacacatcgagagaaactgcaagaacagtcctagtccaaagaaggccaggcagggtggaagctattccaggtcaccagtcaaatcccgctcccctcgtcgccgaaggagcccaagccgtagccgtagttacagtcgaggtcgcagttacagtcgatcgcgatccccagtgagaagagagaaaagcgtagaggacagatcacgcagccctaaggcaatggagcgatctttgtcacctaaaggcagggaccaaagcctgagcccagaccaaaaagtgacagatgcgagcccaaagcgtggatcagagtatgatggtagtccaaaagagaatggtaatggcaggaactctgtgagtcccattgttagaggtgatgaaagtcctgttggacttaatggtcaagacaggagtcccattgatgatgaggctgagcttaaccgtccttcccctaaaggcagtgagtcaccttga

SEQ ID NO: 82 - protein, 284 aa, Arabidopsis lyrata
MPRYDDRYGNTRLYVGRLSSRTRARDLERLFSRYGRVRDVDMKRDYAFVEFSDPRDADDARYYLDGRDFDGSRITVEASRGAPRGSRDNGSRGPPPGSGRCFNCGVDGHWARDCTAGDWKNKCYRCGERGHIERNCKNSPSPKKARQGGSYSRSPVKSRSPRRRRSPSRSRSYSRGRSYSRSRSPVRREKSVEDRSRSPKAMERSLSPKGRDQSLSPDQKVTDASPKRGSEYDGSPKENGNGRNSVSPIVRGDESPVGLNGQDRSPIDDEAELNRPSPKGSESP

SEQ ID NO: 83 - DNA, 855 bp, Arabidopsis thaliana
atgcctcgctatgatgatcgctatggaaacactcgcctctatgttggtcgcttatcatctagaactcgtaccagagaccttgagcgtctctttagcagatacggaagagtacgagatgtggatatgaagcgtgattatgcctttgttgaatttagtgatcctcgtgatgctgatgacgcaagatattacttggatggacgggatttcgatggaagtcgcatcactgtggaggcatcaagaggggctcctcgtggttcgcgggacaatggtagcagaggcccacctcctggttctggtcgctgttttaattgtggtgtcgatggccactgggcccgagactgcacagcaggagactggaagaataaatgttaccgctgtggtgaaagaggacacattgagagaaactgcaaaaacagtcctagtccaaagaaggccaggcagggtggaagctattccaggtcaccagtcaaatcccgctcccctcgtcgccgaaggagcccaagccgtagccgtagttacagtcgaggtcgcagctacagtcgatcgcgatccccagtgagaagagagaaaagcgtggaggacagatcacgcagtcctaaggcaatggagcgatctgtatctcccaaaggtagggaccaaagcctgagtccagaccgaaaagtgatagatgcaagcccaaagcgtggatcagactatgatggtagcccaaaagagaatggtaatggcaggaactctgcgagtcccattgttggaggtggtgaaagtcctgttggacttaatggtcaagacaggagcccgattgatgatgaggctgagcttagccgtccttcccctaaaggcagtgagtcaccttga

SEQ ID NO: 84 - protein, 284 aa, Arabidopsis thaliana
MPRYDDRYGNTRLYVGRLSSRTRTRDLERLFSRYGRVRDVDMKRDYAFVEFSDPRDADDARYYLDGRDFDGSRITVEASRGAPRGSRDNGSRGPPPGSGRCFNCGVDGHWARDCTAGDWKNKCYRCGERGHIERNCKNSPSPKKARQGGSYSRSPVKSRSPRRRRSPSRSRSYSRGRSYSRSRSPVRREKSVEDRSRSPKAMERSVSPKGRDQSLSPDRKVIDASPKRGSDYDGSPKENGNGRNSASPIVGGGESPVGLNGQDRSPIDDEAELSRPSPKGSESP

SEQ ID NO: 85 - DNA, 855 bp, Gossypium hirsutum
atgatgatcgttattgttcatactcgtctctatgttggccatatctcctcaagaacccgaacacgtgatctagaacgtctctttagccgatacgggagtttccgcagaatacttgatgtggatatgaagcgtgactatgcctttgttgactttagcgatccccgagatgctgatgatgcaaggtatagcttggatggtcgggactttgatggaagccgcattgttgttgagtttgcaaggggggtgccacgaggttctcgggaatatctagaaagaggcccccctcctggatctggtcgctgctttaattgtggtgttgatggccattgggccagagattgtacagctgaggactggaagaacaaatgttatcgttgtggagaaagaggtcacatagaacgaaactgcaggaacagtccccgaaaactgagttctcgttcacctattagatttcgctcacctcgccgtggcagaagccggggtcgaagttacagccgtggcctgagctactctcgttcaagatctccagttaggagagaacatagtttcagattagagagccctgaggctgagaacagcccatccctctccaaggggagtattcacagcccttctccccgaaatgggaaattgtctgctctgcaagatgaagccgattatgatgaccatagtcccaaggaagtgaaccggagccctgccagtccctatagagatgagagccctgacagaagccagtaccgaagctcttctgatggcaatggtcgcagcctaagtcccagtgtgagagaaaacaatagtcctgttgatgtcgaatatgattacccacttacaccgagaggaagcgagtcaccttaa

SEQ ID NO: 86 - protein, 284 aa, Gossypium hirsutum
MMIVIVHTRLYVGHISSRTRTRDLERLFSRYGSFRRILDVDMKRDYAFVDFSDPRDADDARYSLDGRDFDGSRIVVEFARGVPRGSREYLERGPPPGSGRCFNCGVDGHWARDCTAEDWKNKCYRCGERGHIERNCRNSPRKLSSRSPIRFRSPRRGRSRGRSYSRGLSYSRSRSPVRREHSFRLESPEAENSPSLSKGSIHSPSPRNGKLSALQDEADYDDHSPKEVNRSPASPYRDESPDRSQYRSSSDGNGRSLSPSVRENNSPVDVEYDYPLTPRGSESP

SEQ ID NO: 87 - DNA, 858 bp, Citrus clementina
atgcctcgttatgatgaccggtacggtggtacgcgtctctatgttggacgcttggcttcacggacaagatcacgtgatcttgaggagatcttcagcagatatgggagaattcgcgatgtggatatgaagcgtgacttcgcctttgttgaatttagcgaccctcgtgatgctgacgatgcaagatatagcttaaatggtcgggatgttgatggaagccgtatcattgtggaatttgcaagaggggggccacgtggtcctggtggatctcgtgagtatcttggtcgaggccctcctcctggatctgggcgctgcttcaattgtgggattgatggccattgggctcgagactgcaaggctggagactggaagaataagtgttatcgctgtggtgaacgaggccacatagaacgaaattgtcaaaacagtccaaagaagttaaggaggcctcggagttattcacgttctccaagtcctcgtcgtggtagaagcaggagccgtagttacagtagaggccgcagcgacagccgatcacgatcgcctgtcaagagagataggagtgttgaacgttttgagagaagaacaaggagcccccgagacagtaggagccctaagcgtcgcagaaattcaccaccatcatctaaaggtaggaagcgtagtccaaccccagatgaaagaagtccacaagatcaacgtagcccatccccaagggaccggaggcaggctaatggatcagagtacagtggcagtccaaggggaaagagcagaagccctgtagacgatgccgatggccctgaggataggaatacaggaaccctccggaagagattggccgcagccgaagccccgccgcagccctag

SEQ ID NO: 88 - protein, 285 aa, Citrus clementina
MPRYDDRYGGTRLYVGRLASRTRSRDLEEIFSRYGRIRDVDMKRDFAFVEFSDPRDADDARYSLNGRDVDGSRIIVEFARGGPRGPGGSREYLGRGPPPGSGRCFNCGIDGHWARDCKAGDWKNKCYRCGERGHIERNCQNSPKKLRRPRSYSRSPSPRRGRSRSRSYSRGRSDSRSRSPVKRDRSVERFERRTRSPRDSRSPKRRRNSPPSSKGRKRSPTPDERSPQDQRSPSPRDRRQANGSEYSGSPRGKSRSPVDDADGPEDRNTGTLRKRLAAAEAPPQP

SEQ ID NO: 89 - DNA, 858 bp, Fragaria vesca
atgcctcgctacgatgatcgatatgggaattcgcgtctttatgttggtcgcttggcttcacgcacccggacgcgtgatctggaccggattttcagcagatacgggagagtacgagatgtggacatgaagcgcgagtttgcatttgttgaattttatgatccgcgagatgctgatgatgcaagatatagcttagatggtagggaagttgatggtagtcgtctgattgtggagtttgctaagggggctccacgtggttcccgggaatacatgggcagaggtccaccacctggatctgggcgctgctttaattgtggtattgatggccactgggctcgtgattgtaaggctggtgattggaagaataaatgttatcgctgtggagaaagaggccatattgagaggcagtgcaaaaatagcccaaaagaattaaggcgtgagcggagtcgttcacgttctcctcgccgcggtagaagtcgtagcccaagttacagccgtagctacagccgatcaaggtccccaccaaggagagaacgaagcttggaaagggattatagatctcggagcccttcttatagaagccgtgatctgagcatgagtccagtgccctcaaaggggaggcagcgcagccttacacccgaggatgatagccctcgtggaaggggtagcctttctcctagaaatggcagcttaggccccagagatggtagcaaaagcccaacccctaagagcagaagtcctagccctgaccgtgagattgatagccctgttcgcccttctgctaatggtcgtaaccccagcccgagggaggatatgagccctgttgatgaggacgacgattacaaccgccgctccccttga

SEQ ID NO: 90 - protein, 285 aa, Fragaria vesca
MPRYDDRYGNSRLYVGRLASRTRTRDLDRIFSRYGRVRDVDMKREFAFVEFYDPRDADDARYSLDGREVDGSRLIVEFAKGAPRGSREYMGRGPPPGSGRCFNCGIDGHWARDCKAGDWKNKCYRCGERGHIERQCKNSPKELRRERSRSRSPRRGRSRSPSYSRSYSRSRSPPRRERSLERDYRSRSPSYRSRDLSMSPVPSKGRQRSLTPEDDSPRGRGSLSPRNGSLGPRDGSKSPTPKSRSPSPDREIDSPVRPSANGRNPSPREDMSPVDEDDDYNRRSP

SEQ ID NO: 91 - DNA, 858 bp, Gossypium hirsutum
atgcgtcgctatgatgatcgttattgtcatactcgtctctatgttggccatatctcctcaagaacccgaacacgtgatctagaacgtctctttagccgatacgggagaatacttgatgtggatatgaagcgtgactatgcctttgttgactttagcgatccccgagatgctgatgatgcaaggtatagcttggatggtcgggactttgatggaagccgcattgttgttgagtttgcaaggggggtgccacgaggttctcaggaatatctaggaagaggcccccctcctggatctggtcgctgctttaattgtggtgttgatggccattgggccagagattgtacagctgaggactggaagaacaaatgttatcgttgtggagaaagaggtcacatagaacgaaactgcaggaacagtccccgaaaactgagtagttctcgttcacctattagatctcgctcacctcgccgtggcagaagccggggtcgaagttacagccgaggcctgagctactctcgttcaagatctccggttaggagagaacatagtttcagattagagagccctgaggctgagaacagcccatccctctccaaggggaggaatcacagcccttctccccgaaatcggaaattgtctgctctgcaagatgaagccgattatgatgaccatagtcccaaggaagtgaaccggagccctgccagtcccgatagagatgagagccctgacagaaaccagtaccgaagctcttctgatggcaatggtcgcagcctaagtcccagtgtgagagacaacaatagtcctgttgatgtcgaatatgatgacccacttacaccgagaggaagcgcatcaccttaa

SEQ ID NO: 92 - protein, 285 aa, Gossypium hirsutum
MRRYDDRYCHTRLYVGHISSRTRTRDLERLFSRYGRILDVDMKRDYAFVDFSDPRDADDARYSLDGRDFDGSRIVVEFARGVPRGSQEYLGRGPPPGSGRCFNCGVDGHWARDCTAEDWKNKCYRCGERGHIERNCRNSPRKLSSSRSPIRSRSPRRGRSRGRSYSRGLSYSRSRSPVRREHSFRLESPEAENSPSLSKGRNHSPSPRNRKLSALQDEADYDDHSPKEVNRSPASPDRDESPDRNQYRSSSDGNGRSLSPSVRDNNSPVDVEYDDPLTPRGSASP

SEQ ID NO: 93 - DNA, 858 bp, Glycine max
atgcctcgctatgatgataaatacggcaatacccgcctctatgtgggacacttgtcttcgaggactcgttcccgtgatctggagcgtgcctttagcagatatggaagagttcgaggtgtggatatgaagaatgatttcgcttttgttgattttagtgatcctcgagatgctgatgatgcaagatataacctggatggtcgggatgttgatggaagtcggattattgtggaatttgcaaaaggggctcctcgtgggtcccgggaatatttggggcgaggtcctcctcctggctctggacgctgcttcaattgtggccttgatggccattgggcacgggattgcaaagctggggattggaagaataagtgttaccgctgtggggagagaggacatatagaaaggaactgcaagaacagccccaaaaaattgaggcgaggacggagttattcacgctcaccagtcaggtcacgttcacctcatcgcggcagaagccgtgatcgcagttacagccgagatcgcagctacagtcgatcacgatcccctgtcagaagagaagaaagccctgttcgggaagataggtcacaaagccctgatcacaaaaatagtcctcagccctccaagacaaggaagcatagtccatcacctgaccgtagcccacagaaaagaggtgacacatctcccgacaatgataggttgagtagaagccctgcaagggaccctgaagataggggctatgacagccctaaagttaatggtcgtagtggcagccctagctgtagccccagggatgatgacaggagccccattgacgatgacaacaaccaccgccactcgccaagaggcagcgagtcaccttaa

SEQ ID NO: 94 - protein, 285 aa, Glycine max
MPRYDDKYGNTRLYVGHLSSRTRSRDLERAFSRYGRVRGVDMKNDFAFVDFSDPRDADDARYNLDGRDVDGSRIIVEFAKGAPRGSREYLGRGPPPGSGRCFNCGLDGHWARDCKAGDWKNKCYRCGERGHIERNCKNSPKKLRRGRSYSRSPVRSRSPHRGRSRDRSYSRDRSYSRSRSPVRREESPVREDRSQSPDHKNSPQPSKTRKHSPSPDRSPQKRGDTSPDNDRLSRSPARDPEDRGYDSPKVNGRSGSPSCSPRDDDRSPIDDDNNHRHSPRGSESP

SEQ ID NO: 95 - DNA, 864 bp, Glycine max
atgcctcgctatgatgataaatacggcaatacccgcctctatgtggggcacttatcttcgaggactcgttcccgggatctggagcgtgccttcagcagatatggaagagttcggggtgtggatatgaagaatgatttcgcctttgttgattttagtgatcctcgagatgctgatgatgcaagatataacttggatggtcgggatgttgatggaagtcgtattattgtggaatttgcaaaaggggctcctcgtgggtcccgggaatatttggggcgaggtcctcctcctggctctggacgctgctttaattgtggccttgatggtcattgggcacgggattgcaaagctggggattggaagaataagtgttaccgctgtggggagagaggacatatagaaaggaactgcaagaacagccccaaaaaattgagcacaaggcgaggacggagttattcacggtcaccagtcaggtcacattcacctcgtcgtggcagaagccgtgatcgcagttacagccgagatcgcagctacagtcgatcacgatcccctgtcagaagagaagaaagccccgttcgtgaagataggtcacaaagccctcaacacaaaaatagtcctcagccctccaagacaaggaagcatagtccatcacctgaccgtagcccacagagaagaggtgacacatctcctgacaatgataggttgagcagaagccctgcaagggaccgcgaagataggggctatgacagccctaaagttaatggtcgtagtggcagccctagccgtagccccagggatgatgacaggagccccattgatgatgaagacaaccaccgccactcaccaagaggcagcgagtcaccttaa

SEQ ID NO: 96 - protein, 287 aa, Glycine max
MPRYDDKYGNTRLYVGHLSSRTRSRDLERAFSRYGRVRGVDMKNDFAFVDFSDPRDADDARYNLDGRDVDGSRIIVEFAKGAPRGSREYLGRGPPPGSGRCFNCGLDGHWARDCKAGDWKNKCYRCGERGHIERNCKNSPKKLSTRRGRSYSRSPVRSHSPRRGRSRDRSYSRDRSYSRSRSPVRREESPVREDRSQSPQHKNSPQPSKTRKHSPSPDRSPQRRGDTSPDNDRLSRSPARDREDRGYDSPKVNGRSGSPSRSPRDDDRSPIDDEDNHRHSPRGSESP

SEQ ID NO: 97 - DNA, 864 bp, Glycine max
atgcctcgctatgatgataaatacggcaatacccgcctctatgtgggacacttgtcttcgaggactcgttcccgtgatctggagcgtgcctttagcagatatggaagagttcgaggtgtggatatgaagaatgatttcgcttttgttgattttagtgatcctcgagatgctgatgatgcaagatataacctggatggtcgggatgttgatggaagtcggattattgtggaatttgcaaaaggggctcctcgtgggtcccgggaatatttggggcgaggtcctcctcctggctctggacgctgcttcaattgtggccttgatggccattgggcacgggattgcaaagctggggattggaagaataagtgttaccgctgtggggagagaggacatatagaaaggaactgcaagaacagccccaaaaaattgagcaccaggcgaggacggagttattcacgctcaccagtcaggtcacgttcacctcatcgcggcagaagccgtgatcgcagttacagccgagatcgcagctacagtcgatcacgatcccctgtcagaagagaagaaagccctgttcgggaagataggtcacaaagccctgatcacaaaaatagtcctcagccctccaagacaaggaagcatagtccatcacctgaccgtagcccacagaaaagaggtgacacatctcccgacaatgataggttgagtagaagccctgcaagggaccctgaagataggggctatgacagccctaaagttaatggtcgtagtggcagccctagctgtagccccagggatgatgacaggagccccattgacgatgacaacaaccaccgccactcgccaagaggcagcgagtcaccttaa

SEQ ID NO: 98 - protein, 287 aa, Glycine max
MPRYDDKYGNTRLYVGHLSSRTRSRDLERAFSRYGRVRGVDMKNDFAFVDFSDPRDADDARYNLDGRDVDGSRIIVEFAKGAPRGSREYLGRGPPPGSGRCFNCGLDGHWARDCKAGDWKNKCYRCGERGHIERNCKNSPKKLSTRRGRSYSRSPVRSRSPHRGRSRDRSYSRDRSYSRSRSPVRREESPVREDRSQSPDHKNSPQPSKTRKHSPSPDRSPQKRGDTSPDNDRLSRSPARDPEDRGYDSPKVNGRSGSPSCSPRDDDRSPIDDDNNHRHSPRGSESP

SEQ ID NO: 99 - DNA, 864 bp, Glycine max
atgcctcgctatgatgataaatacggcaatacccgcctctatgtggggcacttatcttcgaggactcgttcccgggatctggagcgtgccttcagcagatatggaagagttcggggtgtggatatgaagaatgatttcgcctttgttgattttagtgatcctcgagatgctgatgatgcaagatataacttggatggtcgggatgttgatggaagtcgtattattgtggaatttgcaaaaggggctcctcgtgggtcccgggaatatttggggcgaggtcctcctcctggctctggacgctgctttaattgtggccttgatggtcattgggcacgggattgcaaagctggggattggaagaataagtgttaccgctgtggggagagaggacatatagaaaggaactgcaagaacagccccaaaaaattgagcaccaggcgaggacggagttattcacgctcaccagtcaggtcacgttcacctcatcgcggcagaagccgtgatcgcagttacagccgagatcgcagctacagtcgatcacgatcccctgtcagaagagaagaaagccccgttcgtgaagataggtcacaaagccctcaacacaaaaatagtcctcagccctccaagacaaggaagcatagtccatcacctgaccgtagcccacagagaagaggtgacacatctcctgacaatgataggttgagcagaagccctgcaagggaccgcgaagataggggctatgacagccctaaagttaatggtcgtagtggcagccctagccgtagccccagggatgatgacaggagccccattgatgatgaagacaaccaccgccactcaccaagaggcagcgagtcaccttaa

SEQ ID NO: 100 - protein, 287 aa, Glycine max
MPRYDDKYGNTRLYVGHLSSRTRSRDLERAFSRYGRVRGVDMKNDFAFVDFSDPRDADDARYNLDGRDVDGSRIIVEFAKGAPRGSREYLGRGPPPGSGRCFNCGLDGHWARDCKAGDWKNKCYRCGERGHIERNCKNSPKKLSTRRGRSYSRSPVRSRSPHRGRSRDRSYSRDRSYSRSRSPVRREESPVREDRSQSPQHKNSPQPSKTRKHSPSPDRSPQRRGDTSPDNDRLSRSPARDREDRGYDSPKVNGRSGSPSRSPRDDDRSPIDDEDNHRHSPRGSESP

SEQ ID NO: 101 - DNA, 864 bp, Triticum aestivum
atgcctcgctatgatgaccgttacgatcgctacgatgaccgttatgatcgttatgacgaccgttttgatcgctataatgaccgttatgatcggtatgaccgatatggtggcaacaccaagttgtacgtgggccatctttctacgcacacccggaccaaggatgttgagtaccttttcggcagatatgggagaatacgatgtgtggagctgaagtatgattatggctttgttgagtttagcgatccccgggatgcagatgatgcaaggtatgagcttgatggccaagaggttgatgggagccgcatcattgttgagtttgcaagagggaccccgcgtggcccaggaggttcccgcgagtacttgggcagaggaccccctcctggttctggccgctgctttaactgtgggattgatgggcactgggctcgtgattgcaatgctggcgactggaaaaataagtgctatcactgtggagaaaagggccatatagaaaaaaactgccagaacagtcctaagaatatcaacttttgcaaatacaggcggggaagaagctactcacgctccccaccacctcatcgcgaaaggagcctaagcaggagttacagccgatcgccttatccaaggagggatgatcgagctgttggccatgaggaaaggcgaccaagaagctctagttacagccctaggaggagtgcttcaccttccggtttgaaccgcagcccagcaccaaatggcaagagccacccaccaaaggagcaagctgaagtcaatggttcacataacggtgtgagaggcaacagcctgagtcccgcccgtgatagccgcccagccaccaacagaatgagccctagcccctgggagtga

SEQ ID NO: 102 - protein, 287 aa, Triticum aestivum
MPRYDDRYDRYDDRYDRYDDRFDRYNDRYDRYDRYGGNTKLYVGHLSTHTRTKDVEYLFGRYGRIRCVELKYDYGFVEFSDPRDADDARYELDGQEVDGSRIIVEFARGTPRGPGGSREYLGRGPPPGSGRCFNCGIDGHWARDCNAGDWKNKCYHCGEKGHIEKNCQNSPKNINFCKYRRGRSYSRSPPPHRERSLSRSYSRSPYPRRDDRAVGHEERRPRSSSYSPRRSASPSGLNRSPAPNGKSHPPKEQAEVNGSHNGVRGNSLSPARDSRPATNRMSPSPWE

SEQ ID NO: 103 - DNA, 873 bp, Arabidopsis thaliana
atgcctcgctatgatgatcgctatgggaacactcgtctttacgttggccgattatcatcgagaactaggacccgagaccttgaacgtctttttagcagatacggaagagtgcgagatgtggatatgaagcgagattatgctttcgttgaatttggtgatccccgtgatgctgatgatgcaagacattacctggacggacgagactttgatggaagtcgcatcactgtggagttttcacgaggggcacctcgtggttctcgggattttgatagcagaggcccaccacctggagctggtcgctgttttaactgtggtgtagatggtcattgggctcgtgactgcacagcaggggactggaagaacaagtgttaccgttgtggagagagaggacacattgagagaaactgcaaaaacagccccaagaagcttaggcgcagtggaagctactccaggtcacctgtaagatcccgttctcctcgtcgtagaagaagcccaagccggagtcttagccgtagccgaagctacagccgatcacgatccccggtgagaagaagagagaggagtgtggaggagagatcacgcagtccaaagcggatggatgactctctatcgccaagagccagagatcgtagtccggttcttgatgatgaaggcagcccaaagatcatagacgggagcccaccaccatcaccaaagcttcaaaaggaagtcggatctgaccgtgacggtggtagcccccaagacaatggcagaaactctgttgtcagtcctgttgtaggagccggtggtgacagttcgaaagaggaccggagccctgttgatgatgattacgagccaaaccgcacttcccctagaggaagtgagtctccttaa

SEQ ID NO: 104 - protein, 290 aa, Arabidopsis thaliana
MPRYDDRYGNTRLYVGRLSSRTRTRDLERLFSRYGRVRDVDMKRDYAFVEFGDPRDADDARHYLDGRDFDGSRITVEFSRGAPRGSRDFDSRGPPPGAGRCFNCGVDGHWARDCTAGDWKNKCYRCGERGHIERNCKNSPKKLRRSGSYSRSPVRSRSPRRRRSPSRSLSRSRSYSRSRSPVRRRERSVEERSRSPKRMDDSLSPRARDRSPVLDDEGSPKIIDGSPPPSPKLQKEVGSDRDGGSPQDNGRNSVVSPVVGAGGDSSKEDRSPVDDDYEPNRTSPRGSESP

SEQ ID NO: 105 - DNA, 876 bp, Arachis hypogaea
atgcctcgctatgaagataaatacggcaacacacgcctctatgttggtcgattggcttcaaggacgcgttcccgtgatctggagcgagttttcagccgatatggaagagttcgagatgtggatatgaagcatgattacgcctttgttgaattcagcgatcctagagatgctgatgatgcaagatacaacttggatggccgtgatgttgatggaagtcgtattattgtggaatttgcgaaaggggttcctcgtggttcccgtgaatatttgggtcgtggtcctcctcctggaactgggcgttgctttaactgtggtattgatggccattgggcccgagattgcaaagctggagactggaagaacaagtgttatcattgtggtgagaggggtcatatagaaaaaaactgcaagaacagtcccaaaaagctgagtagacgtgggcgtagttattcctgctctccggtcaggtcacgttccccagtcaggtcacgctctcctcgtcgtggcagaagcagggacaggagttacaccccagaacgcagttacagtcgatcaagatccccagttaggggggatcgaagcccagttcgtgatagatcagagagcccacgctctagaagccctgaacccaaaggtagccctcagccctcgaaggcaaggaagcatagtccatcacctgatgaagggagtccacagaagagaggtgatgcatctcctggcaatgagaggatggttacacagcaagatggatctgattacagtgatggccccagaggaaagagcagaagccccactagtccagcaggggatgacagcccaaaggctaatggtcgcagcgcagtcctagtcccagagatgatgacaggagtccattga

SEQ ID NO: 106 - protein, 291 aa, Arachis hypogaea
MPRYEDKYGNTRLYVGRLASRTRSRDLERVFSRYGRVRDVDMKHDYAFVEFSDPRDADDARYNLDGRDVDGSRIIVEFAKGVPRGSREYLGRGPPPGTGRCFNCGIDGHWARDCKAGDWKNKCYHCGERGHIEKNCKNSPKKLSRRGRSYSCSPVRSRSPVRSRSPRRGRSRDRSYTPERSYSRSRSPVRGDRSPVRDRSESPRSRSPEPKGSPQPSKARKHSPSPDEGSPQKRGDASPGNERMVTQQDGSDYSDGPRGKSRSPTSPAGDDSPKANGRSAVLVPEMMTGVH

SEQ ID NO: 107 - DNA, 876 bp, Brassica napus
atgcctcgctttgatgatcgatatggaaacactcgcctttacgttggtcgcttgtcatctagaactcgcaccagagaccttgagcgtcttttcagcagatacggaagagtacgagatgttgatatgaagcgcgattatgcctttgttgaatttagcgatcctcgtgatgctgatgacgctagacattaccttgatggacgagacttcgatggaagtcgcatcactgtggaggcttccagaggggcacctcgtggttctcgggatgctcgggataatggtagtagaggtccacctcctggttctggacgctgttttaactgcggtgtcgatggtcattgggctcgggactgcacagcaggggactggaagaacaaatgttaccgctgtggtgaaagaggacacattgagagaaactgcaagaacagtgctagtcctaagaaggccaggggtggtggaagctactccaggtcaccagttaaatcacgctctcctcgccgcagaagaagcccaagccgtagccgtagttacagccgtggtcgtagctacagccgatcacggtcgccagtgagaagagagagaagcgtggaggatagatcactcagtcctaaggcaatggagcgatctgtatctcccagaggcaaagaccaaagcatgagtccagagcgaagggtcgtagatgcaagcccaaaacgggaaaagcaagacggatcagactatgaaggtagcccaaaagagaatggtaatgggaagagctctgtgagtcccattgtgggaggtgaagaaagtcctgctggacttgatggtcaagacaggagtcccattgacgatgagcctgagcttaaccgttcttcccctaaaggcagcgagtcaccttga

SEQ ID NO: 108 - protein, 291 aa, Brassica napus
MPRFDDRYGNTRLYVGRLSSRTRTRDLERLFSRYGRVRDVDMKRDYAFVEFSDPRDADDARHYLDGRDFDGSRITVEASRGAPRGSRDARDNGSRGPPPGSGRCFNCGVDGHWARDCTAGDWKNKCYRCGERGHIERNCKNSASPKKARGGGSYSRSPVKSRSPRRRRSPSRSRSYSRGRSYSRSRSPVRRERSVEDRSLSPKAMERSVSPRGKDQSMSPERRVVDASPKREKQDGSDYEGSPKENGNGKSSVSPIVGGEESPAGLDGQDRSPIDDEPELNRSSPKGSESP

SEQ ID NO: 109 - DNA, 882 bp, Brassica napus
atgcctaggtatgatgatcgttacgggaacactcgtctgtacgttggacacttatcatccagaactcgtaccagagaccttgaacgccttttcaacagatacggaagagtgcgagatgtggatatgaagcgggattatgcctttgttgaatttagtgatccccgtgatgctgatgacgcgagacattacttggatggaagagactttgacggaagtcgcatcacagtggagttttcaagaggggcacctcgtggctctcgggattatgacagcagaggcccacctcctggatcaggtcgctgctttaactgtggtcttgacggtcattgggctcgagactgcactgcaggagactggaagaacaagtgttaccgctgtggtgaaagaggacacattgagagaaactgcaaaaacagtcccaagaagctcaggcggagtggaagctactccaggtcacctgtaagatcccgttctcctcgtcgtagaagaagcccgagccgtagcaggagtcttagccgtagccggagctacagccgatcaagatcccctgtgaaaagaagagagagaagtgaagaggagaggtctcgcagtccgaagagaatggaggactctctatcgccaagaggcagagaccgtagtccgattatggatgatgaaggtagcccaaggatcatagacgggagccctccaccttctccaaagcttgaaaagccagcaggatcagaccatgatggtggtagcagccctcaagacaatggtaatggaagaaacactgttgccagtcctgctgtgggacgtgacagtccgagagaagaccggagccccgttgatgatgattacgaggccaaccgtgcttcacctagaggaagcgagtctccttga

SEQ ID NO: 110 - protein, 293 aa, Brassica napus
MPRYDDRYGNTRLYVGHLSSRTRTRDLERLFNRYGRVRDVDMKRDYAFVEFSDPRDADDARHYLDGRDFDGSRITVEFSRGAPRGSRDYDSRGPPPGSGRCFNCGLDGHWARDCTAGDWKNKCYRCGERGHIERNCKNSPKKLRRSGSYSRSPVRSRSPRRRRSPSRSRSLSRSRSYSRSRSPVKRRERSEEERSRSPKRMEDSLSPRGRDRSPIMDDEGSPRIIDGSPPPSPKLEKPAGSDHDGGSSPQDNGNGRNTVASPAVGRDSPREDRSPVDDDYEANRASPRGSESP

SEQ ID NO: 111 - DNA, 882 bp, Panicum virgatum
atgccccgctacgatgaccggtacggtgggaacacaaggctgtacgtgggtcgtatctcctctcgtacaaggacagaggaccttgaagacattttcagcagatatgggagagtgcgttatgtggatatgaagcatgagttcgcatttgttgagtttagcgatgcccgggatgctgatgatgcaaggtacaaccttgatggtcgggatatcgatggaagccgcataattgttgagtttgctaaaggggttccgcgtggcccaggaggatcccgtgaatatatgggcaggggaccacctccaggttctggccgctgctttaactgtggtattgatgggcactgggctcgtgactgcaaagctggtgactggaaaaacaggtgctaccgctgcggagataggggccacatagaaagagactgtcggaatagccctaagagtctcaggcgtggaagaagttactcaagatccccatcccctcatcgtggaaggagccgtgataggagttacagcaggagccgcagtaggagctacagccgctcccaatctccaaagagggatacccgtgacgaaaggcgatcaatgagccctcgcgacagccgcagcccaaggaggagccctcgtgacagccgcagcccaaggaggagccctcgcgacagccgcagcccaaggaggagcccttcaccatctaaggggaggggccgcagccccagcaggagtcctgcaccaagggaacgcaatggctcagatcacagcatgagcccaaggagagctgacagcggtagcccagcagatcacgagcgccgtggtcgtagcccaagccccagggagtacaaagaaaatggcaaccagcgcatttcgcctagaggaagtgcatccccctga

SEQ ID NO: 112 - protein, 293 aa, Panicum virgatum
MPRYDDRYGGNTRLYVGRISSRTRTEDLEDIFSRYGRVRYVDMKHEFAFVEFSDARDADDARYNLDGRDIDGSRIIVEFAKGVPRGPGGSREYMGRGPPPGSGRCFNCGIDGHWARDCKAGDWKNRCYRCGDRGHIERDCRNSPKSLRRGRSYSRSPSPHRGRSRDRSYSRSRSRSYSRSQSPKRDTRDERRSMSPRDSRSPRRSPRDSRSPRRSPRDSRSPRRSPSPSKGRGRSPSRSPAPRERNGSDHSMSPRRADSGSPADHERRGRSPSPREYKENGNQRISPRGSASP

SEQ ID NO: 113 - DNA, 882 bp, Populus trichocarpa
atgccgcgatatgatgatcgatatgccagtacgcgtctctatgttggacacctggctgctaggacacgatcacgggatctggaacatcttttcagcaaatatgggcgagtacgagatgtggatatgaagcgtgactatgcatttgttgaatttagtgatcccagagatgctgatgatgcaaggcattacttagatggcaaggagtttgatggaagtcgtatcattgtggaatttgcaaagggggtacctcgtggttctcgagaatatttgggcagaggtcctcctccaggatctggacgctgctttaattgtggcattgatggccactgggctcgagattgcaaagctggagactggaagaacaagtgttatcgttgtggggaaagaggtcatatagagagaaactgcaagaacagtcccaagaaactcacgcggggaaagagttactctcgatcaccaggtagatcacgctctcctcaccgtggcagaagccgcagcccaagttatagccgaggtcgaagctacagccgatcaagatccccaccaccgaagagagagcgaagtgttgagaatgagaacaggtcattgagccctgaaccaaagagtacaaaggccaggaagcgcagcccaacacctgatgaaggcagcccacgcccttctcccaaatctcgaaaactggatgatgagcaagatagagagtacagtggcagccccacgggaagaagcagaagcagaagcagaagccctcgagatgagaggtatagaagtcctcagactaatggtcgcagccgcattcccagtcccagggatgatagaagccccgttgatgatgattatgaggacaacaaccgctccccgagagatagtgacgtgtcacgttga

SEQ ID NO: 114 - protein, 293 aa, Populus trichocarpa
MPRYDDRYASTRLYVGHLAARTRSRDLEHLFSKYGRVRDVDMKRDYAFVEFSDPRDADDARHYLDGKEFDGSRIIVEFAKGVPRGSREYLGRGPPPGSGRCFNCGIDGHWARDCKAGDWKNKCYRCGERGHIERNCKNSPKKLTRGKSYSRSPGRSRSPHRGRSRSPSYSRGRSYSRSRSPPPKRERSVENENRSLSPEPKSTKARKRSPTPDEGSPRPSPKSRKLDDEQDREYSGSPTGRSRSRSRSPRDERYRSPQTNGRSRIPSPRDDRSPVDDDYEDNNRSPRDSDVSR

SEQ ID NO: 115 - DNA, 882 bp, Vitis vinifera
atgaaattgttccaccaatgcagtttgaaaatgcctcgttatgatgatcgatatggtaatacacgtctttatgttggtcgcttgtcttcaagaacacgtacacgtgatctagagagcctcttcagcagatacgggagagtacgagatgtggatatgaagcacgacttcgcctttgttgaattcagtgatccccgagatgctgatgatgcaagatataacttaaatggacgagattttgatggaagtcgtatcattgtggaatttgcgaaagggggaccccgtggtggatcaggtggttctcgagaatatctaggtcgaggtcctccgcctgggtctggacgctgcttcaattgtggcattgatggccactgggctcgagattgcaaagctggagactggaagaataagtgttatcggtgtggagaaagaggtcatattgaaagaaactgccagaacagtcccaggaagctcagccgacatggacggagttactcacgatctccagttagatctcgccatggcaggagccggagccgaagttatagcccaagtcgcagttacagccgatcgagatctcctccaaagagagatcgaagcattgagcgagacaagaggtcagggagccctcgtacacctacatccaaaccaaggaagcgcagcccaacgcctgaagacagcaggcctcaagaaagaatcagccctaatgtttataaaagagaacagccagagtacagccaaagccccagggagaagagcagaagccctgttagaggtaccgaagcccttctgatgctaatgggcgaagtcgcagccagaaggagtcctctagatgaagatgaagataataacagtcgctccccaagaggtagtgaatccccttga

SEQ ID NO: 116 - protein, 293 aa, Vitis vinifera
MKLFHQCSLKMPRYDDRYGNTRLYVGRLSSRTRTRDLESLFSRYGRVRDVDMKHDFAFVEFSDPRDADDARYNLNGRDFDGSRIIVEFAKGGPRGGSGGSREYLGRGPPPGSGRCFNCGIDGHWARDCKAGDWKNKCYRCGERGHIERNCQNSPRKLSRHGRSYSRSPVRSRHGRSRSRSYSPSRSYSRSRSPPKRDRSIERDKRSGSPRTPTSKPRKRSPTPEDSRPQERISPNVYKREQPEYSQSPREKSRSPVRGTEALLMLMGEVAARRSPLDEDEDNNSRSPRGSESP

SEQ ID NO: 117 - DNA, 885 bp, Citrus clementina
tccctcggtgggggtgtgtgccaccaaaccacccccccaaaagaaaaagaggcggaaaaaaaaaaaaagtttttttttttttgagaaattttttggggtttgtttttttcttttttttaaccactataaaggggaacaataaaaaaaaaataaaaaaaaaaaaaatcttttttttttttttttttgtgggtgggggggggggggggggaggtttttttaaaaaaaaaaaacccttcaaaaattggtgttggggtttttattattaaaaccaacctgggggagggggggggcccaaaagaaaccccggggggttatatttaaaaaaacaaaaaaaaaaaaaacccaccccccgggttaaaaaatttttaaatttttttccgaaacacaatttcccaagccccaagaaagcgggggtttttaccccttttccctctaaaaaatttttttttcccctcaacccctaaaattctgttgtggttttttcccaattttttccccccccaaaaaaaaggttttttccaaaaaaatcccaaagaacaattttccccccccccgagtttaaaaaaaggggccccccccttgttttttttataccccctttaaggggcccctttttccaaaaaaaaggggggggggaaaattgggcccccccgggggaaattttaagggggccccccccttttttttttttttttttttttttttttttttttttttttttttttttttttttttttttttttgggtttttttttttttttttttttttttttttttttttttttttttttttttttttttttgcaaataaaccaacatgaatttacgaacagttccaacataataaaaaattaaaatctcaagcaagttcataaaaatattcaa

SEQ ID NO: 118 - protein, 294 aa, Citrus clementina
MPRYDDRYGGTRLYVGRLASRTRSRDLEEIFSRYGRIRDVDMKRDFAFVEFSDPRDADDARYSLNGRDVDGSRIIVEFARGGPRGPGGSREYLGRGPPPGSGRCFNCGIDGHWARDCKAGDWKNKCYRCGERGHIERNCQNSPKKLRRPRSYSRSPSPRRGRSRSRSYSRGRSDSRSRSPVKRDRSVERFERRTRSPRDSRSPKRRRNSPPSSKGRKRSPTPDERSPQDQRSPSPRDRRQANGSEYSGSPRGKSRSPVDDAEGPEDRNYRSPPEENGAAEAAALVQSLGMIGAH

SEQ ID NO: 119 - DNA, 888 bp, Brassica napus
atgcctcgctacgatgatcgttacagcagcaatgaccgatacggtggtgcgcgtctctatgttggccacctctcctctcgaacaagggaacgtgatcttgaacacctcttcagcaaatacggaagaattcgagatttggacatgaagcgagactatgccttcattgagttcagcgatcctagagatgcggatgatgcgaggtacaggttggacggaagagactttgatggaagccgtatcactgtggagtttgccagagggacacctcgtggttcccgtgacttttcctcgagcagaggccctcctcccccagggagtggtcgttgcttcaactgtggtctcgaaggacactgggctcgtgattgctctgctggtgactggaagaacaaatgttatcgatgtggagataggggtcacattgagaggaactgcaagaacagtcctaagaagctcaggcgggacgcaagttactcaagatcgccggttaggtctcggtctaggtctcctcctcgtcgcagaagaagaagccccagcagaagctatagccgtgaccgtagctacagtcgctccagatctccggttaggaaggaaacggatcgtagccctgaagctgcaaggagcagaagccctgaagctgctagaagcagaagccctgaagctgcaaggagcagaagccctgaactaatggtggacaactctcctccatcaaaagataggaagcgaagtttgactcctgaagaaggcagtccaatgcgtgagaagaacagccccaaggagaatgaattgagcccgagaggaaacgatggtggaggtattggaaccaatgagcaagaccgaagccatagtcccagagaagaccgtagccctgtggaggatgatgaccagtga

SEQ ID NO: 120 - protein, 295 aa, Brassica napus
MPRYDDRYSSNDRYGGARLYVGHLSSRTRERDLEHLFSKYGRIRDLDMKRDYAFIEFSDPRDADDARYRLDGRDFDGSRITVEFARGTPRGSRDFSSSRGPPPPGSGRCFNCGLEGHWARDCSAGDWKNKCYRCGDRGHIERNCKNSPKKLRRDASYSRSPVRSRSRSPPRRRRRSPSRSYSRDRSYSRSRSPVRKETDRSPEAARSRSPEAARSRSPEAARSRSPELMVDNSPPSKDRKRSLTPEEGSPMREKNSPKENELSPRGNDGGGIGTNEQDRSHSPREDRSPVEDDDQ

SEQ ID NO: 121 - DNA, 888 bp, Brassica rapa
atgcctaggtatgatgatcgttacgggaacactcgtctgtacgttggacacttatcatccagaactcgtaccagagaccttgaacgccttttcaacagatacggaagagtgcgagatgtggatatgaagcgggattatgcctttgttgaatttagtgatcctcgtgatgctgatgatgcgagacattacttggatggacgagactttgatgggagtcgcatcacagtggagttttcaagaggggcacctcgtggctctcgggattatgacagcagaggcccacctcctggatcaggtcgctgctttaactgtggtcttgacggtcattgggctcgagactgcactgcaggagactggaagaacaagtgttaccgctgtggtgaaagaggacacattgagagaaactgcaaaaacagtcccaagaagctcaggcggagtggaagctactccaggtcacctgtaagatcccgttctcctcgtcgtagaagaagcccaagccgtagcaggagccttagccgtagccgaagctacagccgctcaagatcccctgtgaaaagaagagagagaagtgcagaggagagatctcgcagtccaaagagaatggaggactctctatcgccaagaggcagagaccgtagtccgattatggatgatgaaggtagcccaaggatcatagacgggacccctccaccttctccaaagcttgaaaagccagcaggatcagaccatgatggtggtagcagccctcaagacaatggtaatggaagaaacactgttgccagtcctgctgtgggacgcagtgccgacagtccgagagaagaccggagccccgttgatgatgattacgaggccaaccgtgcttcacctagaggaagcgagtctccttga

SEQ ID NO: 122 - protein, 295 aa, Brassica rapa
MPRYDDRYGNTRLYVGHLSSRTRTRDLERLFNRYGRVRDVDMKRDYAFVEFSDPRDADDARHYLDGRDFDGSRITVEFSRGAPRGSRDYDSRGPPPGSGRCFNCGLDGHWARDCTAGDWKNKCYRCGERGHIERNCKNSPKKLRRSGSYSRSPVRSRSPRRRRSPSRSRSLSRSRSYSRSRSPVKRRERSAEERSRSPKRMEDSLSPRGRDRSPIMDDEGSPRIIDGTPPPSPKLEKPAGSDHDGGSSPQDNGNGRNTVASPAVGRSADSPREDRSPVDDDYEANRASPRGSESP

SEQ ID NO: 123 - DNA, 891 bp, Citrus clementina
atgcctcgttatgatgaccggtacggtggtacgcgtctctatgttggacgcttggcttcacggacaagatcacgtgatcttgaggagatcttcagcagatatgggagaattcgcgatgtggatatgaagcgtgacttcgcctttgttgaatttagcgaccctcgtgatgctgacgatgcaagatatagcttaaatggtcgggatgttgatggaagccgtatcattgtggaatttgcaagaggggggccacgtggtcctggtggatctcgtgagtatcttggtcgaggccctcctcctggatctgggcgctgcttcaattgtgggattgatggccattgggctcgagactgcaaggctggagactggaagaataagtgttatcgctgtggtgaacgaggccacatagaacgaaattgtcaaaacagtccaaagaagttaaggaggcctcggagttattcacgttctccaagtcctcgtcgtggtagaagcaggagccgtagttacagtagaggccgcagcgacagccgatcacgatcgcctgtcaagagagataggagtgttgaacgttttgagagaagaacaaggagcccccgagacagtaggagccctaagcgtcgcagaaattcaccaccatcatctaaaggtaggaagcgtagtccaaccccagatgaaagaagtccacaagatccacgtagcccatccccaagggaccggaggcaggctaatggatcaaaatacagtggcattccaaggggaaaaaagcaaaaccctgtaaacgatggccatggccctgaagaaaaggattacaggagccctcccaaaaaaatggccggcacccaaaccccaccccccaccttaatccattccctagggaagaaagaacccctttga

SEQ ID NO: 124 - protein, 296 aa, Citrus clementina
MPRYDDRYGGTRLYVGRLASRTRSRDLEEIFSRYGRIRDVDMKRDFAFVEFSDPRDADDARYSLNGRDVDGSRIIVEFARGGPRGPGGSREYLGRGPPPGSGRCFNCGIDGHWARDCKAGDWKNKCYRCGERGHIERNCQNSPKKLRRPRSYSRSPSPRRGRSRSRSYSRGRSDSRSRSPVKRDRSVERFERRTRSPRDSRSPKRRRNSPPSSKGRKRSPTPDERSPQDPRSPSPRDRRQANGSKYSGIPRGKKQNPVNDGHGPEEKDYRSPPKKMAGTQTPPPTLIHSLGKKEPL

SEQ ID NO: 125 - DNA, 891 bp, Phaseolus vulgaris
atgcctcgctatgatgataagtatggaaatacccgcctgtatgtgggtcgtttgtctttggatactcgttcccgtgatctggagcgtgtcttcggcagatatggaagagttcgaggtgtggatatgaagaatgatttcgcctttgttgaatttagcgatcctcgagatgctgatgaagctagatataacttggatggtcgtgacgttgaaggaagtcgtattattgtggagtttgccaaggggggtcctcgtggttcccgggaatacatgggtcggggtccaccgcctggatctggacgatgctttaactgtggcattgatggtcattgggctcgtgattgcaaagctggggattggaagaataagtgttaccgctgtggggaaagaggtcatatagagaagaactgcaagaacagtcccaaaaaactgagcagcagacgtggacgcagtcgttctcgatcacctgtgaggtcacgttctcctcgtcgtgggagaagcagggatagaagctacagccgtgaccgaagctacagtcgatcgagatctcctcctgttaggagagaacgtagcccagtttctgaagatagatcacggagtcctcagccgtccaaaataaggaggcatagtgcatcgcctgaccgaggcagcccccagaagggaggtgtcagatctcctggtaatgataggttggtcaatcagcgagatgggtctgaatacagtgatggttcaagagggaaaagtagaagccctgcaagggaccgtaatgtgcggggctatgatagccctaaagctaatggacgtagtggcagtcccagccgtagtcctagggatgatgacaggagccccattgatgaagatgatgacaaccaccgccgctcacagtcaccttag

SEQ ID NO: 126 - protein, 296 aa, Phaseolus vulgaris
MPRYDDKYGNTRLYVGRLSLDTRSRDLERVFGRYGRVRGVDMKNDFAFVEFSDPRDADEARYNLDGRDVEGSRIIVEFAKGGPRGSREYMGRGPPPGSGRCFNCGIDGHWARDCKAGDWKNKCYRCGERGHIEKNCKNSPKKLSSRRGRSRSRSPVRSRSPRRGRSRDRSYSRDRSYSRSRSPPVRRERSPVSEDRSRSPQPSKIRRHSASPDRGSPQKGGVRSPGNDRLVNQRDGSEYSDGSRGKSRSPARDRNVRGYDSPKANGRSGSPSRSPRDDDRSPIDEDDDNHRRSQSP

SEQ ID NO: 127 - DNA, 891 bp, Sorghum bicolor
atgccccgctacgacgatcgttacaatgatcgttacgatgaccgttacgatgatcgttacggtgggaacacacggctgtatgtgggtcgtgtctcttcccgtacaaggacacgggatcttgaagaccttttcggcagatatgggagagtgcgttatgtggatatgaagcatgagtttgcgtttgttgagttcagtgatccccgagatgctgatgatgcaaggtatcaccttgatgatagggagttcgatggtagccgattgattgttgagtttgcaaaagggattccacgtggtccaggaggatcccgtgaatatatgggcaagggaccgcctcctggttctggccgctgctttaactgtggtatggatgggcactgggctcgtgactgcaaagctggtgactggaaaaacagatgctaccgctgtggagataggggccatatagaaagagactgtcaaaacagccctaagaacctgaggcgtggaagaagttactcaagatccccatcccctcgtcgtgaaaggagccctgttaggagttacagcaggagccgcagtaggggctatagccgttcacgatctccaaggcagaacagccgtgatgaaaggagccctcgtgacagccgcagcccaaggaggagccctcgcgatagccgcagcccaaggaggagcccctcactgtccaagggaagagaccgcagccccagccctaatggtagcaggagccctgcaccaagggaacgcaatggctcagattacagcatgagccctaggagggatgacagccgtagtccagcagaccacctgcgccgtgagatcagtccagcagccaatggtcgtagccctagcccaggggtcaatgataatggcaatcaccgctcatctccctga

SEQ ID NO: 128 - protein, 296 aa, Sorghum bicolor
MPRYDDRYNDRYDDRYDDRYGGNTRLYVGRVSSRTRTRDLEDLFGRYGRVRYVDMKHEFAFVEFSDPRDADDARYHLDDREFDGSRLIVEFAKGIPRGPGGSREYMGKGPPPGSGRCFNCGMDGHWARDCKAGDWKNRCYRCGDRGHIERDCQNSPKNLRRGRSYSRSPSPRRERSPVRSYSRSRSRGYSRSRSPRQNSRDERSPRDSRSPRRSPRDSRSPRRSPSLSKGRDRSPSPNGSRSPAPRERNGSDYSMSPRRDDSRSPADHLRREISPAANGRSPSPGVNDNGNHRSSP

SEQ ID NO: 129 - DNA, 894 bp, Coffea canephora
atgcctcgctatgatgatcgccatggtgttacaaggctctatgttggccgcctttcttcaaggacccgttcacgtgacctggaggatctatttagcagatatggaagagtacgtgatgtggacatgaagcgtgattatgcctttgtggaatttagtgatcctagagatgctgatgatgcaagatatagcatgaatggccgggaagtagatggaagtcgtattattgtggaatttgcaaagggggtaccacgtggtcctggtggctcccgtgatcgtgattatcttggcaagggtccagctcctggaactgggcgctgctttaattgtggaatcgatggccattgggctcgagattgcaaagctggggactggaagaacaagtgctatcgatgtggtgaacgaggccatatagaaaggaactgtcaaaacagcccccaaaagctaaaacgcgggcgcagttattctcgatcaccatctcctcctcgtcgtggcaggagtccaagccgtagttacagcaggagcagaagctacagccgatcgaggtctccaccaaggagggatcgtagcaacgagcgtgaggagaaaagatctaggagccctaagcgtcacagggtatcatctccaccaccatccaaagggaggaagcacagcccaacacctgatgagagaagcccccgagagagggccactccttcaccaagggatggtaggccagccaatgactcagagtatagtagaagccctaaagatgatgctccaagggatgatggtatcaaagataggagtcctcttgaagaaaatggccgtagccgaagtcctagccccatccgtagggacaatggaagccccgctgataatgatgaaaccaatggttcaccaaggggcagtgagtga

SEQ ID NO: 130 - protein, 297 aa, Coffea canephora
MPRYDDRHGVTRLYVGRLSSRTRSRDLEDLFSRYGRVRDVDMKRDYAFVEFSDPRDADDARYSMNGREVDGSRIIVEFAKGVPRGPGGSRDRDYLGKGPAPGTGRCFNCGIDGHWARDCKAGDWKNKCYRCGERGHIERNCQNSPQKLKRGRSYSRSPSPPRRGRSPSRSYSRSRSYSRSRSPPRRDRSNEREEKRSRSPKRHRVSSPPPSKGRKHSPTPDERSPRERATPSPRDGRPANDSEYSRSPKDDAPRDDGIKDRSPLEENGRSRSPSPIRRDNGSPADNDETNGSPRGSE

SEQ ID NO: 131 - DNA, 894 bp, Glycine max
atgcctcgctatgatgataaatatggtaatacccgcctctatgttggacgcttgtcttcgaggacacgttcccgtgacctggagcgtgtcttcagcagatatggaagaattcgaggtgtagatatgaagaatgattttgcctttgttgaatttagcgatcctcgggatgctgatgatgctagatatagcttggatggtcgtgatgttgaaggaagtcgtatcattgtggaatttgccaaggggggtcctcgtggttcccgggaaaacttgggtcggggtctacctcctggatctggacgatgctttaactgtggcattgatggtcattgggcccgagattgcaaagctggggattggaagaacaagtgttaccgttgtggggaaagaggtcatatagaaaagaactgtaagaacagtcccaaaaagtcgagccgacatggacggagtctttcacgttcaccggtccggtcacattctcctcgtcgtggcagaagccgggatcgaagctacagccgagaccgcaactacagccgatcgagatctccagtcagaagagaacgaagcccagtttctgaagatagatcacagagtcctgagccctccaagataaggaagcatagcacatcacctgatcaaagcagcccacggaagagaggtgacccggctcctggcaatgataggttggccactctgcaagatgggtctgactacagtgatggtcctagagggaaaagtagaagccctgctagccctgcaagggaccatgatgagggcaactatgatagccctaaagctagtgggcgtagccacagccccagcaggagccctagggaagatgacaggagccccattgatgaagatgatgacaacaaccgtcgctcagggtcaccttga

SEQ ID NO: 132 - protein, 297 aa, Glycine max
MPRYDDKYGNTRLYVGRLSSRTRSRDLERVFSRYGRIRGVDMKNDFAFVEFSDPRDADDARYSLDGRDVEGSRIIVEFAKGGPRGSRENLGRGLPPGSGRCFNCGIDGHWARDCKAGDWKNKCYRCGERGHIEKNCKNSPKKSSRHGRSLSRSPVRSHSPRRGRSRDRSYSRDRNYSRSRSPVRRERSPVSEDRSQSPEPSKIRKHSTSPDQSSPRKRGDPAPGNDRLATLQDGSDYSDGPRGKSRSPASPARDHDEGNYDSPKASGRSHSPSRSPREDDRSPIDEDDDNNRRSGSP

SEQ ID NO: 133 - DNA, 894 bp, Glycine max
atgcctcgctatgatgataaatatggtaatacccgcctctatgttggacgcttgtcttcgaggacacgttcccgtgacctggagcgtgtcttcagcagatatggaagaattcgaggtgtagatatgaagaatgattttgcctttgttgaatttagcgatcctcgggatgctgatgatgctagatatagcttggatggtcgtgatgttgaaggaagtcgtatcattgtggaatttgtcaaggggggtcctcgtggttcccgggaaaacttgggtcggggtctacctcctggatctggacgatgctttaactgtggcattgatggtcattgggcccgagattgcaaagctggggattggaagaacaagtgttaccgttgtggggaaagaggtcatatagaaaagaactgtaagaacagtcccaaaaagtcgagccgacatggacggagtctttcacgttcaccggtccggtcacattctcctcgtcgtggcagaagccgggatcgaagctacagccgagaccgcaactacagccgatcgagatctccagtcagaagagaacgaagcccagtttctgaagatagatcacagagtcctgagccctccaagataaggaagcatagcacatcacctgatcaaagcagcccacggaagagaggtgacccggctcctggcaatgataggttggccactctgcaagatgggtctgactacagtgatggtcctagagggaaaagtagaagccctgctagccctgcaagggaccatgatgagggcaactatgatagccctaaagctagtgggcgtagccacagccccagcaggagccctagggaagatgacaggagccccattgatgaagatgatgacaacaaccgtcgctcagggtcaccttga

SEQ ID NO: 134 - protein, 297 aa, Glycine max
MPRYDDKYGNTRLYVGRLSSRTRSRDLERVFSRYGRIRGVDMKNDFAFVEFSDPRDADDARYSLDGRDVEGSRIIVEFVKGGPRGSRENLGRGLPPGSGRCFNCGIDGHWARDCKAGDWKNKCYRCGERGHIEKNCKNSPKKSSRHGRSLSRSPVRSHSPRRGRSRDRSYSRDRNYSRSRSPVRRERSPVSEDRSQSPEPSKIRKHSTSPDQSSPRKRGDPAPGNDRLATLQDGSDYSDGPRGKSRSPASPARDHDEGNYDSPKASGRSHSPSRSPREDDRSPIDEDDDNNRRSGSP

SEQ ID NO: 135 - DNA, 900 bp, Glycine max
atgcctcgctatgatgataaatatggtaatacccgcctctatgttggacgcttgtcttcgaggactcgttcccgtgacctggagcgtgtcttcagcagatatggaagagttcgaggcgtagatatgaagaatgatttcgcctttgttgaatttagtgatcctcgagatgctgatgatgctagatacaacctggatggtcgtgatgttgaaggaagtcgtattattgtggaatttgccaaggggggtcctcgtggttcccgggaccgggaatatatgggtcggggtccacctcctggatctgggcgatgctttaactgtggcattgatggtcattgggcccgagattgcaaagccggggattggaagaacaagtgttaccgttgtggggaaagaggtcatatagaaaagaactgtaagaacagtcccaaaaagttgagccaacgtggacggagtctttcacgttcaccagtaaggtcacgttctcctcgtcgtggaagaagcagggatcgaagctacagccgagaccacagctacagccgatcgagatctcctgtcagaagagaacgaagcccagtttctgaagatagatcacagagtcctgagccctccaagataaggaagcatagcacatcacctgatcaaagcagcccacggaagagaggtgacacatctcctggcaatgataggttggccactcatcaagatgggtctgactacagtgatggtcctagagggaaaagtagaagccctgctagccctgcaagggaccgtgatgagggcaactatgatagccctaaagctaatggacatagccgcagccccagccggagccctagggatgatgacaggagccccattgatgaagatgatgacaaccaccgtcgctcacagtcaccttga

SEQ ID NO: 136 - protein, 299 aa, Glycine max
MPRYDDKYGNTRLYVGRLSSRTRSRDLERVFSRYGRVRGVDMKNDFAFVEFSDPRDADDARYNLDGRDVEGSRIIVEFAKGGPRGSRDREYMGRGPPPGSGRCFNCGIDGHWARDCKAGDWKNKCYRCGERGHIEKNCKNSPKKLSQRGRSLSRSPVRSRSPRRGRSRDRSYSRDHSYSRSRSPVRRERSPVSEDRSQSPEPSKIRKHSTSPDQSSPRKRGDTSPGNDRLATHQDGSDYSDGPRGKSRSPASPARDRDEGNYDSPKANGHSRSPSRSPRDDDRSPIDEDDDNHRRSQSP

SEQ ID NO: 137 - DNA, 900 bp, Glycine max
atgcctcgctatgatgataaatatggtaatacccgcctctatgttggacggttgtcttcgaggactcgttcccgtgacctggagcgtgtcttcagcagatatggaagagttcgaggcgtagatatgaagaatgatttcgcctttgttgaatttagtgatcctcgagatgctgatgatgctagatacaacctggatggtcgtgatgttgaaggaagtcgtattattgtggaatttgccaaggggggtcctcgtggttcccgggaccgggaatatatgggtcggggtccacctcctggatctgggcgatgctttaactgtggcattgatggtcattgggcccgagattgcaaagccggggattggaagaacaagtgttaccgttgtggggaaagaggtcatatagaaaagaactgtaagaacagtcccaaaaagttgagccaacgtggacggagtctttcacgttcaccagtaaggtcacgttctcctcgtcgtggaagaagcagggatcgaagctacagccgagaccacagctacagccgatcgagatctcctgtcagaagagaacgaagcccagtttctgaagatagatcacagagtcgtgagccctccaagataaggaagcatagtgcatcacctgaccaaagcagcccacggaagagaggtgacacatctcctggcaatgataggttggccactcatcaagatgggtctgactacagtgatggtcctagagggaaaagtagaagccctgctagccctgcaagggaccgtgatgagggtggctatgatagccctaaagctaatggacatagccgcagccccagccggagccctagggatgatgacaggagccccattgatgaagatgatgacaaccaccgtcgctcacagtcaccttga

SEQ ID NO: 138 - protein, 299 aa, Glycine max
MPRYDDKYGNTRLYVGRLSSRTRSRDLERVFSRYGRVRGVDMKNDFAFVEFSDPRDADDARYNLDGRDVEGSRIIVEFAKGGPRGSRDREYMGRGPPPGSGRCFNCGIDGHWARDCKAGDWKNKCYRCGERGHIEKNCKNSPKKLSQRGRSLSRSPVRSRSPRRGRSRDRSYSRDHSYSRSRSPVRRERSPVSEDRSQSREPSKIRKHSASPDQSSPRKRGDTSPGNDRLATHQDGSDYSDGPRGKSRSPASPARDRDEGGYDSPKANGHSRSPSRSPRDDDRSPIDEDDDNHRRSQSP

SEQ ID NO: 139 - DNA, 900 bp, Ipomoea batatas
atgccgcgatatgatgatcgttacggtggatcccgcctctatgttggtcacctctcttccaggacgcggtctcgtgatttggaggacatctttgccaaatacgggagagtacgagatgtggatatgaagcgtgactatgcatttgtggaatatagtgatcctcgagatgctgacgatgctatatataggctaaatggtcgggaagttgatgggagtcgcatcattgtggagattgccaagggggtgccacgtgggcctggtggatctcgtgagtattctggccgtggtcctgctccaggaacagggcgttgcttcaattgtggaattgaaggccactgggctcgcgattgcaaggctggagactggaagaacaaatgttatcgttgtggggagcgaggtcatatagaaagaaattgtcctgacagtcccaaaaagaatagtggacgtggtcggagttattctcgatcaccatctccacgccgtggcaggaaccgaagccgtagttatagcaggggtcgtagttacagccgatccagatcacctgcaaagagagagcgcagcattgatcacgaggagagacgatctaggagtcccaggcatcgcaaatcttccccaccaccatcaaaaggaagacagcatagccccacacctgatgaaaggagcccgcgtgaaagaggcacaccatccccactggacaatagaccagtgaatggttcagaatatgaccgaagccccaaggatggaactgaaacagacgaccgaagatatgatgatgaaaagaacatgagccctcttgaagaaaatgatcgcagtcgcagcaatagccctatccccagggacaatgaaagccccatagaaaatgataagcgtggctctccaagaggcagcgagtcaccttaa

SEQ ID NO: 140 - protein, 299 aa, Ipomoea batatas
MPRYDDRYGGSRLYVGHLSSRTRSRDLEDIFAKYGRVRDVDMKRDYAFVEYSDPRDADDAIYRLNGREVDGSRIIVEIAKGVPRGPGGSREYSGRGPAPGTGRCFNCGIEGHWARDCKAGDWKNKCYRCGERGHIERNCPDSPKKNSGRGRSYSRSPSPRRGRNRSRSYSRGRSYSRSRSPAKRERSIDHEERRSRSPRHRKSSPPPSKGRQHSPTPDERSPRERGTPSPLDNRPVNGSEYDRSPKDGTETDDRRYDDEKNMSPLEENDRSRSNSPIPRDNESPIENDKRGSPRGSESP

SEQ ID NO: 141 - DNA, 903 bp, Ananas comosus
atgccccgccacgacgaccgatatggcacgcgtttgtatgtcggccgactctcgtctcgtactcgatccagggaccttgaagaccttttcagcaaatatggaagagtacgatatgtggatatgaagcacgactttgccttcgttgaattcagtgattctcgtgatgctgatgatgcaagatacagcctgcatggtcgtgaatttgatggaagccgtattattgtggaatttgctagggggggtccacgtggcccaggaggttcacgtgaatatctgggaagagggccgccacctggaaccgggcgttgctttaattgtggtattgatggccactgggctcgtgattgcaaagccggggactggaaaaacaagtgctatcgctgtggagaaagaggccatatagaaagaaactgccagaatagtccaaagaatctctcgaggcgtgagaggagtgggaggagttactcacgatcgccatctcctcgtcgtggtaggagccgaagtcgtagctacagcagaagtcgtagttacagtcgatcccgatctccaaagcgagatggtcgtggtgcagaacgcgatgagtggcgatcaaggagccgcagttacagccggagcccaaagaggagccctgcgccatccaagggaaggaagcgcagcctctcccctaacggcagccggagcccgccacctcaggaccggactgaccgcaacggatctgactacagccagagcccgaggaggagggatgacagccggagcccggctggccgggagagcgcaagcccggctgccgaaggccggaggtatcgaagccctgcggctaacgggcgtggccctagccctagggatgaggaggataatggcaaccaccgcacttcgcccagaggaagtgaatccccttga

SEQ ID NO: 142 - protein, 300 aa, Ananas comosus
MPRHDDRYGTRLYVGRLSSRTRSRDLEDLFSKYGRVRYVDMKHDFAFVEFSDSRDADDARYSLHGREFDGSRIIVEFARGGPRGPGGSREYLGRGPPPGTGRCFNCGIDGHWARDCKAGDWKNKCYRCGERGHIERNCQNSPKNLSRRERSGRSYSRSPSPRRGRSRSRSYSRSRSYSRSRSPKRDGRGAERDEWRSRSRSYSRSPKRSPAPSKGRKRSLSPNGSRSPPPQDRTDRNGSDYSQSPRRRDDSRSPAGRESASPAAEGRRYRSPAANGRGPSPRDEEDNGNHRTSPRGSESP

SEQ ID NO: 143 - DNA, 903 bp, Lotus japonicus
atgcctcgctatgatgataagtatggtaacacccgcctctatgtgggtcgcttgtcttccaggacgcgttcccgtgatctcgagcgagtcttcagcagatatggaagagttcgagacgtggatatgaagcgtgattatgcctttgttgaatttagcgatcctcgagatgctgatgatgcaagatataacttggatggacgtgatgttgatggaagtcgtcttattgttgaatttgcaaaaggggttccccgtggttctcgtgaagggggcgggggccgggaccgcgaccgggaatatatgggtcgtggtccacctcctggatctggacgctgctttaactgtggtattgatggccactgggctcgagattgcaaagctggggattggaagaacaagtgttatagatgtggagagagaggtcatatagaaaagaactgcaagaacagtcccaaaaagttgagtcgacaccctaggagtgattcacgttcaccagtcaggtcacgatctcctaggcgtggcaggagccgggatcgaagttacaccccagagcgcagctacagccgatcaagatccccagtcagaagagatcgaagcccttttcctgaagatcgatcaaggagtcctccctccaggacaaggaagcatagtctatctcctgacctagacagcccacagaagagaagtgatgcatctcctcctggcaatgataggttggccacaacccgagatggatctgactacagcgatgatgccagggcgaagagtagaagccccgcaagggaccttgatgatgatagccccaaagctgacaatgggcgtagccgcagtgctagccctagggatgatgataggagccccattgaagaagatgatgacaaccaccgtcaatctccgtcaccttag

SEQ ID NO: 144 - protein, 300 aa, Lotus japonicus
MPRYDDKYGNTRLYVGRLSSRTRSRDLERVFSRYGRVRDVDMKRDYAFVEFSDPRDADDARYNLDGRDVDGSRLIVEFAKGVPRGSREGGGGRDRDREYMGRGPPPGSGRCFNCGIDGHWARDCKAGDWKNKCYRCGERGHIEKNCKNSPKKLSRHPRSDSRSPVRSRSPRRGRSRDRSYTPERSYSRSRSPVRRDRSPFPEDRSRSPPSRTRKHSLSPDLDSPQKRSDASPPGNDRLATTRDGSDYSDDARAKSRSPARDLDDDSPKADNGRSRSASPRDDDRSPIEEDDDNHRQSPSP

SEQ ID NO: 145 - DNA, 909 bp, Nicotiana tabacum
atgccgcggtatgatgataggtatggtggtacacgcctctatgttggacatttgtcttccagaacgcgatctcgagacttggaggacgtctttagcagatacgggagagtacgtgatgtggatatgaagcgtgactatgcttttgtggaatttagtgatcctcgagatgctgatgatgcaagatacggcctaaatgggcgggacgttgatggaagccgtattactgtggaattcgcaaaaggggtacctcgtggtccaggtggatctcgagagtttggcggcagaggtcctcctccaggtacaggtcgttgctttaattgtggacttgatggccattgggctcgagattgtaaggctggggactggaagaacaagtgttaccgctgtggggagcgaggtcatatagaaagaaactgtcagaatagccccaagaaattgaaacgtggacgaagttattcccgctcaccgtctcctcgtcgtggcagaagtcgcagccgcagttacagcagaggtcgtagctacagccgatccaggtctcctgtgaggagggactccaggtctcctgtgaagagggaccaaagcattgagcatgaagagagaagatcaagtagtcctcgccctcgaagatcatcaccacctccatcaaaaggaaggaaatacagcccttcacctgatgaaagaagtccacaagagagaggtacgccgtcccctaagggtgatagggcagccaatggttccgagtatagcaggagccctacagacgatgctggaatagacgaacgcagaaatttgagccctattgaagaaaatggccgcagtcacagcaatagccccatccatagagagaacgggagcccaatgggtgatgatgaaaatcatggttctccaaggggcagcgagtcaccttaa

SEQ ID NO: 146 - protein, 302 aa, Nicotiana tabacum
MPRYDDRYGGTRLYVGHLSSRTRSRDLEDVFSRYGRVRDVDMKRDYAFVEFSDPRDADDARYGLNGRDVDGSRITVEFAKGVPRGPGGSREFGGRGPPPGTGRCFNCGLDGHWARDCKAGDWKNKCYRCGERGHIERNCQNSPKKLKRGRSYSRSPSPRRGRSRSRSYSRGRSYSRSRSPVRRDSRSPVKRDQSIEHEERRSSSPRPRRSSPPPSKGRKYSPSPDERSPQERGTPSPKGDRAANGSEYSRSPTDDAGIDERRNLSPIEENGRSHSNSPIHRENGSPMGDDENHGSPRGSESP

SEQ ID NO: 147 - DNA, 912 bp, Gossypium raimondii
atgcctaggtatgatgaccgccgcagtagtggtacacgcctttatgttggtcacttgtcttcgaggacaaggtcacgtgatcttgaggacatgtttaggagatatgggagaatacgtgatgtggatatgaagcgtgactatgcattcgttgaattcagtgaccctagagatgctgatgatgcaagatattcattgaatggtagagaccttgacggaagccgtatagttgttgaatttgccaagggggtgcctcgtggccctggtgggtctcgtgattaccctggaagaggtcctgctcctggagcagggcgctgcttcaactgtggaattgatggtcactgggctcgtgattgcaaagctggggattggaagaataagtgttatcgctgtggtgaacgaggccatatcgaaagaaattgtcaaaacagtccaaagaaactgagccgtcgacctcgcagttactcacgttcacctagtcctcgccgtggaagaagcagaagccgcagttatagtaggggacgtagcaacagtagatcgagaacacctgtgaagagagaacaaggtttcgagcgcgatgatagaagatcgaggagtcctaagtcccacaggggttctcctttgccacccagaggccggaagcatggtccaactctcgacgaaagaagcccacaagagggaggtagtccttcctcgagagatcggaggcacaccaatggctccaaatacagccccagggaaaggagccaaagcccagatcatgaagctgatgctgaggacagggcttataggagttccacaaaagaaaacggccagagtcatagccctagcccagtaccaagggaggatcggagcccgatttacaatgatgatgatgataataatcgggcttctagacgcagtgaatcaaattaa

SEQ ID NO: 148 - protein, 303 aa, Gossypium raimondii
MPRYDDRRSSGTRLYVGHLSSRTRSRDLEDMFRRYGRIRDVDMKRDYAFVEFSDPRDADDARYSLNGRDLDGSRIVVEFAKGVPRGPGGSRDYPGRGPAPGAGRCFNCGIDGHWARDCKAGDWKNKCYRCGERGHIERNCQNSPKKLSRRPRSYSRSPSPRRGRSRSRSYSRGRSNSRSRTPVKREQGFERDDRRSRSPKSHRGSPLPPRGRKHGPTLDERSPQEGGSPSSRDRRHTNGSKYSPRERSQSPDHEADAEDRAYRSSTKENGQSHSPSPVPREDRSPIYNDDDDNNRASRRSESN

SEQ ID NO: 149 - DNA, 915 bp, Asparagus officinalis
atgcctcgatatgacgatcgctacggcggcacaaggttgtatgttggtcatttgtcttcccgcactcgtacacgtgatcttgaagacctttttagcagatatggcagagtacgtgatgtggctttgaagcatgactacgcctttgttgaatacagtgatcctagagatgcagatgatgcaaggtacagcttaaacggaagggattttgatggaagtcgaatcattgtggaattcgctaaagggggtccacgaggctcaggagagagaggaggcggatcccgtgaatatcttggaagagggcccccacctggctctggtcggtgcttcaactgtgggattgatgggcactgggcaagagattgcaaagcaggggattggaaaaacaagtgctatcgctgtggagaaagaggtcacatagaaagaaactgccacaacagtcccaagagtctgagacgtggccgaagttattcacgatcgctatctcctcgccctcgtcgtggtagaagccggagccgaagtttcagccgtagtcgtagctacagtcgatctagatctcctgctccaaggagaagggagcgaagcctagaccgagacgacaggcgatctagaagccctagatacagccccaaatcaaagaacagtcgcagtcctccaccaaagtcaagaaaccgcagcatttctcccgaaggtagcggaagcccaccaccaagagagcagaaaaaagctgaacaaaacggctcagagtacagcggaagcccaaagagaaacgacagccggagccctatcagccaagaaagagagggttctccagaggcaaatggtcggagccctagccctagggattatggggatgccgatgacaacaacaacaataataatcacgggtctaaaggcagcgaatccccgcaggaataa

SEQ ID NO: 150 - protein, 304 aa, Asparagus officinalis
MPRYDDRYGGTRLYVGHLSSRTRTRDLEDLFSRYGRVRDVALKHDYAFVEYSDPRDADDARYSLNGRDFDGSRIIVEFAKGGPRGSGERGGGSREYLGRGPPPGSGRCFNCGIDGHWARDCKAGDWKNKCYRCGERGHIERNCHNSPKSLRRGRSYSRSLSPRPRRGRSRSRSFSRSRSYSRSRSPAPRRRERSLDRDDRRSRSPRYSPKSKNSRSPPPKSRNRSISPEGSGSPPPREQKKAEQNGSEYSGSPKRNDSRSPISQEREGSPEANGRSPSPRDYGDADDNNNNNNHGSKGSESPQE

SEQ ID NO: 151 - DNA, 915 bp, Gossypium hirsutum
atgcctaggtatgatgaccgacgcggtggcactcgtttgtatgttggtcatttgtcttcaaggacaagatcacgtgatctagaggacatgtttagcagatatgggagagtacgtgatgtggatatgaagcgtgactatgcatttgttgaattcagtgatcctagagatgccgatgatgcaagatatgcattgaatggtcgagacatggatggaagccggatgattgttgaatttgccaaaggagtgccccgtggttcaggtggatctcgagattaccctggaagaggtcccactcctgggtcaggacgctgcttcaactgtggaattgatggtcattgggctcgtgattgcaaagccggggattggaagaataagtgttaccgctgtggagaacgaggccatatagaaagaaattgtcaaaacagtccaaagaaactaagaccacgcagttactctcgctcacctagcccctaccgtggtagaagcagaagccgcagttacagcaggggacgcagcgccagtagatcaagatcccctgtgaagagagaccgaagttacgagcgcgaggatagaatatcaaggagccctaagccccccaagggttctccatccccatctcaagggaggaagcatagtccaccccccgatgaaaaaaggccccaagaggggggtggtccttccccaaaggaccgcaggcatgcgaatggttcggattatagtgcaagtcctaggggaaggagcagaagccccgatgctgatgctggggctgaggatggggcttataggagctttaggaaggaaaatggccccagccgcacccttagtcccccccctagggatgacaggagccctgtttacgatgatgatgatgatgatgataatcatgcgtttccccgacgcggtgaatcaaattaa

SEQ ID NO: 152 - protein, 304 aa, Gossypium hirsutum
MPRYDDRRGGTRLYVGHLSSRTRSRDLEDMFSRYGRVRDVDMKRDYAFVEFSDPRDADDARYALNGRDMDGSRMIVEFAKGVPRGSGGSRDYPGRGPTPGSGRCFNCGIDGHWARDCKAGDWKNKCYRCGERGHIERNCQNSPKKLRPRSYSRSPSPYRGRSRSRSYSRGRSASRSRSPVKRDRSYEREDRISRSPKPPKGSPSPSQGRKHSPPPDEKRPQEGGGPSPKDRRHANGSDYSASPRGRSRSPDADAGAEDGAYRSFRKENGPSRTLSPPPRDDRSPVYDDDDDDDNHAFPRRGESN

SEQ ID NO: 153 - DNA, 915 bp, Solanum tuberosum
atgccgcggtatgatgacaggtatggtggcacacgcctatatgttggacatttgtcatcccgaacgcgatctcgagacttggaggacgtctttagcagatatgggagagtacgtgatgtggatatgaagcgtgactatgcttttgtggagtttagtgatcctcgagatgccgatgatgcaagatacggcctaaatgggcgagatgttgatggaagccgcgttatcgtggagttcgccaaaggggtgcctcgtggtccaggtggatctcgagagtttggtggcagaggtcctcctccaggtacaggtcgttgctttaattgtggaattgatggacattgggctcgagattgtaaagctggggactggaagaacaagtgttaccgctgtggagaccgaggtcatatagaaagaaactgtcagaacagccccaagaaattgaaacgtgaccgaagttattcccgctcaccatctcctcggcgtggaagaagccgcagccgcagttacagcagaggtcgtagctacagccgatccaggtctcctgtgaagagggaccgtagcattgagcgtgaagagaagagatcaaggagtcctcgccaacataggccatcaccacctccatcaaagggaaggaaacacagcccttcacctgatgaaagaagtccacaagagagaggtacgccatcaccaagggatgatagggcaaccaatggttctgaccgcagcaggagccctaaagatgatgctagaatggatgaacgcggagatattagccctgttgaagaaaatggccgtagtcgcagcaatagccccatccatagggaggacagaagcccagtggaggacggaagcccaacaggtgactatgaaaatcatggttctccaaggggttctccaaggggcagtgagtcaccctaa

SEQ ID NO: 154 - protein, 304 aa, Solanum tuberosum
MPRYDDRYGGTRLYVGHLSSRTRSRDLEDVFSRYGRVRDVDMKRDYAFVEFSDPRDADDARYGLNGRDVDGSRVIVEFAKGVPRGPGGSREFGGRGPPPGTGRCFNCGIDGHWARDCKAGDWKNKCYRCGDRGHIERNCQNSPKKLKRDRSYSRSPSPRRGRSRSRSYSRGRSYSRSRSPVKRDRSIEREEKRSRSPRQHRPSPPPSKGRKHSPSPDERSPQERGTPSPRDDRATNGSDRSRSPKDDARMDERGDISPVEENGRSRSNSPIHREDRSPVEDGSPTGDYENHGSPRGSPRGSESP

SEQ ID NO: 155 - DNA, 915 bp, Theobroma cacao
atgcctaggtatgatgaccgccgcagtggtactcgcctttatgtcggacacttgtcttcaaggacaagatcacgtgatctagaggacatgtttagcagatatggaagaatacgtgatgtggatatgaagcgcgactatgcatttgttgaatttagcgaccctagagatgctgatgatgcaagatatgcattgaatggtcgagatctagatggaagccgtatcattgtggaattcgccaagggagtgccccgtggcccaggtggatctcgtgattaccctggaagaggaggacctactcctgggtcaggacgctgcttcaactgtggaattgatggtcactgggctcgtgattgcaaagctggagattggaagaataagtgttatcgctgtggagaacgaggccacatagaaagaaattgtcaaaacagtcctaagaaactgagccgcagaccacgcagttactcacgctcacctagtccccgccgtggtagaagcagaagccgtagttacagcagggggcgtagcgacagtcgatcaagatcacctgtgaagagagaaagaagtttcgagcgtgacgatagaagatcaaggagccctaagcgccacaggggttctccgtccccctccaaaggaaggaagcatagtccagcacctgatgaaagaagcccacgagagagaggtagcccttctccaagagaccgcaggcacaccaatggttcagattacagtgcaagtcctaggggaaggagcagaagccctgaccgtgaagctgatgtcgaaggaaggtcttataggagctctgcgaaggaaaacggccacagccgcagccctagcccactccctagggatgacaggagcccaatctacgatgatgatgagaatcatgcttctcctaggcgcagtgaatcaaattaa

SEQ ID NO: 156 - protein, 304 aa, Theobroma cacao
MPRYDDRRSGTRLYVGHLSSRTRSRDLEDMFSRYGRIRDVDMKRDYAFVEFSDPRDADDARYALNGRDLDGSRIIVEFAKGVPRGPGGSRDYPGRGGPTPGSGRCFNCGIDGHWARDCKAGDWKNKCYRCGERGHIERNCQNSPKKLSRRPRSYSRSPSPRRGRSRSRSYSRGRSDSRSRSPVKRERSFERDDRRSRSPKRHRGSPSPSKGRKHSPAPDERSPRERGSPSPRDRRHTNGSDYSASPRGRSRSPDREADVEGRSYRSSAKENGHSRSPSPLPRDDRSPIYDDDENHASPRRSESN

SEQ ID NO: 157 - DNA, 918 bp, Gossypium hirsutum
atgcctaggtatgatgatcaccgtggtggcactcgcctttatgtcggtcacttgtcttcaaggacaagatcacgtgatcttgaggacatgtttagcagatatggaagagtacgtgatgtggatatgaagcgcgactatgcattcgttgaattcagtgaccctagagatgctgatgatgcaagatattcgttgaatggtcgagacctagacggatgccgtatcattgtggaatttgccaagggagtgccccgaggccctggtggatctcgtgattatgctggaagaggtcctactcctggatctgggcgctgcttcaattgtggaatcgatggtcactgggctcgtgattgcaaagccggcgattggaagaataagtgttaccgctgtggggaacgaggccacatagaaagagattgtcaaaacagtccaaagaaactgagccgtagaccacggagttactcgcgttcacccagtgcccgacgtggtcgaagcagaagccgcagttacagccgagggcgtagtgacagtagatcgaaatcacctgtgaagcgagaaagaagtttcgagcgtgacgatagaagatcaaggagtcctaagcgccacaggcgttctctgtccccagttcgggggaggaagcatagtccagcacgtgatgaaagaagcccacaagagagacgtagcccatccccaagggatcgcagacatgccaatggttcggattacagtgggagtcccagggggaggagcagaactccagatcgtgaagctgatgctgaagacagggattataagagctccgcaaaggaaaatgggaacagccgcagtcctagcccgctccccaaagatgatcggagccctatttatgatgaagaagatgatgagaatcatgcatctccgagacgcagcgaatcaaattaa

SEQ ID NO: 158 - protein, 305 aa, Gossypium hirsutum
MPRYDDHRGGTRLYVGHLSSRTRSRDLEDMFSRYGRVRDVDMKRDYAFVEFSDPRDADDARYSLNGRDLDGCRIIVEFAKGVPRGPGGSRDYAGRGPTPGSGRCFNCGIDGHWARDCKAGDWKNKCYRCGERGHIERDCQNSPKKLSRRPRSYSRSPSARRGRSRSRSYSRGRSDSRSKSPVKRERSFERDDRRSRSPKRHRRSLSPVRGRKHSPARDERSPQERRSPSPRDRRHANGSDYSGSPRGRSRTPDREADAEDRDYKSSAKENGNSRSPSPLPKDDRSPIYDEEDDENHASPRRSESN

SEQ ID NO: 159 - DNA, 921 bp, Fragaria vesca
atgcctcgtcatgatgaccgcagtggtggttcacggctctatgttggccgcttgtcgtcccggacaagatcacgggaactcgaagatgtattcagcagatatggaagagtacgtgatgtggatatgaagcgtgattttgcctttgttgaattcaatgatccccgtgatgctgatgacgcaagatacagcctgaacggtcgggatgttgatgggagccgtttaattgtggaatttgccaggggggcaccacgtggtcctggtggatcccgtgagtatcttggtagagggcctcctcctggttcaggtcgctgtttcaattgcggacttgatgggcactgggctcgagattgcaaagctggggactggaagaataagtgttatcgctgtggagatcgaggccacattgaaagaaattgtcagaacagcccaaaaaaaacttcctccaaacgtgggcggagtcactcacgctcaccaagtccaaggcgggacagaagtcgaagccgtagttacagcaggggtcatagttacagtcgatcaagatcacctgtgaggagagaaaggagtctagagagaaggtcgaggagtcctgcagacagccggagcccaaagcgtcgcagggcttctccaccaccttccaaggggaggaagcatgaccaatcacctgatggaagaagcccacaagagaggcgtagcgtctccccgcaggatggccgatctgattacagtaggagtcccaggggaaagagtagaagccctatgggtgatgccgaagagaaaagcaatggtgataagaggcaaagaacccctgtggaagaaaatggccatagccgcagcccaagccccgtgcgtaggggtggcaggagccctgttgaagaggatgatgataaccatggttctccaagaggcagtgaatcagcttaa

SEQ ID NO: 160 - protein, 306 aa, Fragaria vesca
MPRHDDRSGGSRLYVGRLSSRTRSRELEDVFSRYGRVRDVDMKRDFAFVEFNDPRDADDARYSLNGRDVDGSRLIVEFARGAPRGPGGSREYLGRGPPPGSGRCFNCGLDGHWARDCKAGDWKNKCYRCGDRGHIERNCQNSPKKTSSKRGRSHSRSPSPRRDRSRSRSYSRGHSYSRSRSPVRRERSLERRSRSPADSRSPKRRRASPPPSKGRKHDQSPDGRSPQERRSVSPQDGRSDYSRSPRGKSRSPMGDAEEKSNGDKRQRTPVEENGHSRSPSPVRRGGRSPVEEDDDNHGSPRGSESA

SEQ ID NO: 161 - DNA, 927 bp, Lotus japonicus
atgcctcgttatgatgataagcatgacaatacccgcctctatgtgggtcacttgtcttcaaggaccagggaacgtgatctcgagagagctttcagcaagtatggaagagttcgaggtgtggatatgaagcataatttcgcctttgttgaatttagcgatcctcgagatgctgatgatgcaagatataacctggatggtcgtgatgttgaaggaagtcgtattgttgtggaatttgccaaagggggtcctcgcggtaaccgcgaatacttgggtcgaggtccacctcctggatctggacgctgcttcaattgtggccttgatggtcattgggcccgagattgcaaagctggggattggaagaacaagtgctaccgatgtggggataggggtcatgtagaaaggaactgcaagaacagtcccaaaaaaacgagtggcagacgtggaaggagttattctcgttcaccggtcaggtctcgttcccctcgtcgtgacagaagtcgtgatcgaagttatagccgagaccgcagctacagccgatcaagatcccctatcggtagagaaaaaagcccacttcgtgatggatcactcagtcctcgcaacagaagccctgtgcctaaaagtagccctcagccctccaagaccaggaagcatagtttatcacctgaccgagctagcccacagaagagaggtgactcctctcctgctgaggatgggttggtcacccagcaagatgggtctgactacagcaatggccatagagataggagcagaagccctgctagccctgtaagggaccgtgaaggtagccttaaagctaatggtcgcagtcagagccctggccgaagtccaagggatgatgacaggagccccattgatgatgatgatggcaaccaccgccgcttgccaagaggtagtgagtccccttga

SEQ ID NO: 162 - protein, 308 aa, Lotus japonicus
MPRYDDKHDNTRLYVGHLSSRTRERDLERAFSKYGRVRGVDMKHNFAFVEFSDPRDADDARYNLDGRDVEGSRIVVEFAKGGPRGNREYLGRGPPPGSGRCFNCGLDGHWARDCKAGDWKNKCYRCGDRGHVERNCKNSPKKTSGRRGRSYSRSPVRSRSPRRDRSRDRSYSRDRSYSRSRSPIGREKSPLRDGSLSPRNRSPVPKSSPQPSKTRKHSLSPDRASPQKRGDSSPAEDGLVTQQDGSDYSNGHRDRSRSPASPVRDREGSLKANGRSQSPGRSPRDDDRSPIDDDDGNHRRLPRGSESP

SEQ ID NO: 163 - DNA, 927 bp, Triphysaria sp.
atgcctcgttatgaagatagatatggcggtactacccgcctctatgttggccacttgtcttcaaggacccgttctcgagatttggagcacattttcagtagatatggaagaatacgcgacgtggatatgaagcgagactatgccttcatcgagttcagcgatcagcgtgatgctgatgatgcaagatatagcttggatggacgggatgttgatgggcgccgtatcactgttgaatttgccaagggagtgccacgtggagctgggggtgttcgtgagtatgccggccgaggtcctcctccaggatctggacggtgtttcaattgtggcctagatggccattgggcccgagattgcaaagctggagactggaaaaataaatgctatcgttgtcaggaaagaggtcacatcgaaaggaactgccagaacagccctaagaaagcaagtggacgaaggagttattcacggtcacctgtgaggtcacgctctcctcgccgtagtcatcgcagcaggagccggagcttaagtagaagtcgcagttacagtcggtcaaggtcccctgcagctagaaggggtcgtgaaactgatcataaggaaaggagatcgagaagccctatcaatgaaagcccggagccaaagaggtctgtttctccctccaagacgaggaaattgagcccgacgcctgatagggagaggtcgagagagattagcctttcgccagctagggtgggaatggaaacagagcaagttgggtacaacagtgacagccctaaggagactagccgaagcccaccagctaggaggtatgatgagagccctgatgctgctgctgccaatggtcgagaacgaagccccagccctagggatgataggagcccggttgatgatgacgatacgacggcccgttctccaggcagcgagtctccttga

SEQ ID NO: 164 - protein, 308 aa, Triphysaria sp.
MPRYEDRYGGTTRLYVGHLSSRTRSRDLEHIFSRYGRIRDVDMKRDYAFIEFSDQRDADDARYSLDGRDVDGRRITVEFAKGVPRGAGGVREYAGRGPPPGSGRCFNCGLDGHWARDCKAGDWKNKCYRCQERGHIERNCQNSPKKASGRRSYSRSPVRSRSPRRSHRSRSRSLSRSRSYSRSRSPAARRGRETDHKERRSRSPINESPEPKRSVSPSKTRKLSPTPDRERSREISLSPARVGMETEQVGYNSDSPKETSRSPPARRYDESPDAAAANGRERSPSPRDDRSPVDDDDTTARSPGSESP

SEQ ID NO: 165 - DNA, 930 bp, Vitis vinifera
atgagatcgatgctgtcctttttattattaacaataaaaaaaccacatttgggtgcagataaaatgcctcggtatgatgaccgccatgggagtacccgtctttatgttggtcgtttgtcttctcggacaaggtcgcgtgatctggaggacctatttagtagatatggaagagtacgcgatgtggacatgaagcacgactttgcctttgttgaattcagtgatccacgagatgccgatgatgcaaggtatagcttgaatggtcgagatttcgatggaagtcgtataatagtagaatttgctaaggggggtccacgcggtcctggtgggtctcgtgagtatcttggcagaggtcctccacctggatcaggtcgctgctttaactgtggaattgatggccattgggctcgagattgtaaagctggtgattggaagaacaagtgttaccgctgtggggaacggggccatatagaaagaaattgtcagaatagtccgaagaagctaaagcgtggacgtagttattctcggtctccatctcctcgtcgtggtcggagccggagccgaagcagaagtcgtagttacagcaggagccgcagttacagatcatctcctaagagggagcgaagtgctgagcgtctggagagaagatctaggagccctcatgacagcaggagccctaagcggcgcaaggcatcaccaccaccatcaaagggaaggaaacgcagtccaacacctgatgagaggagcccaaaagagagaagcccctccccaagggatcgtaagcagaccaccaatgtgacagccccaggagagacagcccaagagataggaattacaggaggagccctgatgaagaaaatggccacagtcgcagccctagtcccattcctagggacgatgcaagtcctgttgatgatgatgagtaacgagtaa

SEQ ID NO: 166 - protein, 309 aa, Vitis vinifera
MRSMLSFLLLTIKKPHLGADKMPRYDDRHGSTRLYVGRLSSRTRSRDLEDLFSRYGRVRDVDMKHDFAFVEFSDPRDADDARYSLNGRDFDGSRIIVEFAKGGPRGPGGSREYLGRGPPPGSGRCFNCGIDGHWARDCKAGDWKNKCYRCGERGHIERNCQNSPKKLKRGRSYSRSPSPRRGRSRSRSRSRSYSRSRSYRSSPKRERSAERLERRSRSPHDSRSPKRRKASPPPSKGRKRSPTPDERSPKERSPSPRDRKQTTNVTAPGETAQEIGITGGALMKKMATVAALVPFLGTMQVLLMMMSNE

SEQ ID NO: 167 - DNA, 939 bp, Pinus taeda
atgccccgctatgatgatcgttctggaaacacacggctctatgttggccgactgtcttctcgtacccgtacacgtgatcttgaggatcttttcaacagatatggaagagtccgtgatgtggatttgaagcacgacttcgcctttattgaatttagcgatcctcgtgatgcggatgaagcaagatactatcttaatggaagagatctcgatgggagtcgcattgttgtggaatttgcaagagggggaccacgaggagctggtcgaactagagaatatctaggaaggggccctccccctgggtctgggcggtgcttcaattgtgggaatgatggccattgggctcgagactgtaaagcaggggattggaaaaacaaatgttatcgttgtggtgagcgtggtcatattgaaagaaactgtcaaaacagtccaaaatcaaccaggcgtgagcggtctatttcaagatcacgttctaggtcattgtcgcatcgtcgtggaagaagccgcagtctaagctacaacagccgaagtcgcagctacagtcgatcccccagatcaccaaggacagatgggcgtagtgcagttcaggttgaaaggagatcaagaagtcgaagttacagccacagtcctaggagggcaaggagacaaagcccagaaatagatggtcgcaggagcagcagtcgttcagctgacaatgcaagtggccagaggggcagtagatatagtccgaaacgaaacagtcgcaggagtgacagtccagcactagacactgcatcaagggacattgctagtcctcagagggatactcctgtaagatcccaaagtccagctgcaaacggcaagcccagtcatgatgtaagcccagatgccatgaaaaatcaaagcccaagcccaatcagagattcatctgctttcagagagagccctggaactagttcttga

SEQ ID NO: 168 - protein, 312 aa, Pinus taeda
MPRYDDRSGNTRLYVGRLSSRTRTRDLEDLFNRYGRVRDVDLKHDFAFIEFSDPRDADEARYYLNGRDLDGSRIVVEFARGGPRGAGRTREYLGRGPPPGSGRCFNCGNDGHWARDCKAGDWKNKCYRCGERGHIERNCQNSPKSTRRERSISRSRSRSLSHRRGRSRSLSYNSRSRSYSRSPRSPRTDGRSAVQVERRSRSRSYSHSPRRARRQSPEIDGRRSSSRSADNASGQRGSRYSPKRNSRRSDSPALDTASRDIASPQRDTPVRSQSPAANGKPSHDVSPDAMKNQSPSPIRDSSAFRESPGTSS

SEQ ID NO: 169 - DNA, 939 bp, Poncirus trifoliata
atgcctcgttatgatgaccggtacggtggtacgcgtctctatgttggccgcttggcttcacggacaagatcacgcgatcttgaggagatctttagcagatatgggagaattcgcgatgtggatatgaagcgtgacttcgcctttgttgaatttagcgaccctcgcgatgctgacgatgcaagatatagcttaaatggtcgggatgttgatggaagccgtatcattgtggaatttgcaagaggggggccacgtggtcctggtggatctcgtgagtatcttggtcgaggccctcctcctggatctgggcgctgcttcaattgtgggattgatggccattgggctcgagactgcaaggctggagactggaagaataagtgttatcgctgtggtgaacgaggccacatagaacgaaattgtcaaaacagtccaaagaagttaaggaggcctcggagttattcacgttctccaagtcctcgtcgtggtagaagcaggagccgtagttacagtagaggccgcagcgacagccgatcacgatcgcctgtcaagagagataggagtgtcgaacgttttgagagaagaacaaggagcccccgagacagtaggagccctaagcgtcgcagaaattcaccaccatcatctaaaggtaggaagcgtagtccaaccccagatgaaagaagtccacaagatcaacgtagcccatccccaagggaccggaggcaggctaatggatcagagtacagtggcagtccaaggggaaagagcagaagccctgtagatgatgccgatggccctgaggataggaattacaggagccctcccgaagagaatggccgcagccgaagccgcagccgcagccttagtccagtccctagggatgataggagcccaattgatgatgatgataatcatggggaccctagaggcagcgaatcaaattaa

SEQ ID NO: 170 - protein, 312 aa, Poncirus trifoliata
MPRYDDRYGGTRLYVGRLASRTRSRDLEEIFSRYGRIRDVDMKRDFAFVEFSDPRDADDARYSLNGRDVDGSRIIVEFARGGPRGPGGSREYLGRGPPPGSGRCFNCGIDGHWARDCKAGDWKNKCYRCGERGHIERNCQNSPKKLRRPRSYSRSPSPRRGRSRSRSYSRGRSDSRSRSPVKRDRSVERFERRTRSPRDSRSPKRRRNSPPSSKGRKRSPTPDERSPQDQRSPSPRDRRQANGSEYSGSPRGKSRSPVDDADGPEDRNYRSPPEENGRSRSRSRSLSPVPRDDRSPIDDDDNHGDPRGSESN

SEQ ID NO: 171 - DNA, 939 bp, Sorghum bicolor
atgcctcgctatgatgatcgctatgggaatacacgcttgtatgttggaagattggctccccgcacccgttcccgcgacctagaatatcttttcagcaaatatggaagaatacgtgaagtggagttgaagcgcgactatgcattcattgaattcagcgacccccatgatgctgatgatgcgcagtacaacctagatggcagggaagttgatggaagccgcattattgttgaatttgccaaaggggttcctcgtggttctggtggttcacgtgaatacatgggaagagggcctccaccaggaacaggccgctgttttaactgtggaattgatggtcactgggcaagagactgcaaggctggtgactggaagaacaaatgctaccgctgtggcgaaaggggccatatagaaagaaattgccagaacagcccaaggaatctcaggcgtgagagaagctattcacggtctccatccccacgccgtggacggggccgcagccggagctacagcagaagccgtagctatagccgatccaggtccccatctggatctcccaggggtggacgccgcgaacgtgacgagaggagatcaaggagcctgagctacagcaggagtgcaagccccaggcgttctgtgtcaccagcgaaggaaaaggagcgcagccgcactcctgatggcagtaggagcccaaggagccccagcccaagggatgatgtgagcccaccaccaaaggataatggtgcacacaacggctcagaccgtgaagacagccctggggccagggagaacagcaagaggagtcggagcccatctgacggctaccgtagccctgcggccaatgggcgcagcccgagccctagagatgaccgtagcccaagccccaagggcaacaatggtgatgacgagcgccgtggctcaccaagaggaagtcagtccccttga

SEQ ID NO: 172 - protein, 312 aa, Sorghum bicolor
MPRYDDRYGNTRLYVGRLAPRTRSRDLEYLFSKYGRIREVELKRDYAFIEFSDPHDADDAQYNLDGREVDGSRIIVEFAKGVPRGSGGSREYMGRGPPPGTGRCFNCGIDGHWARDCKAGDWKNKCYRCGERGHIERNCQNSPRNLRRERSYSRSPSPRRGRGRSRSYSRSRSYSRSRSPSGSPRGGRRERDERRSRSLSYSRSASPRRSVSPAKEKERSRTPDGSRSPRSPSPRDDVSPPPKDNGAHNGSDREDSPGARENSKRSRSPSDGYRSPAANGRSPSPRDDRSPSPKGNNGDDERRGSPRGSQSP

SEQ ID NO: 173 - DNA, 939 bp, Saccharum officinarum
atgcctcgctatgatgatcgctatgggaatacacgcttgtatgttggaagattggctccccgcacccgttcccgcgacctagaatatcttttcagcaaatatggaagaatacgtgaagtggagttgaagcgcgactatgcattcattgaattcagcgacccccaagatgctgatgatgcgcagtacaacctagatggcagggaagttgatggaagccggattattgttgaatttgctaaaggggttcctcgtggttctagtggttcacgtgaatatatgggaagaggacctccaccaggaacaggtcgttgttttaactgtggaattgatggtcactgggcaagagactgcaaggctggtgactggaagaacaaatgttaccgctgtggcgaaaggggccatatagaaagaaattgccagaacagtccaaggaatctcaggcgtgagagaagctattcacgttctccatccccacgccgtggacggggccgcagccggagctacagcagaagccggagctatagccgatccaggtccccatctggatctccgaggggtggacgccgtgaccgtgatgagaggagatcaaggagtgttagctacagcaggagcgcaagccctaggcgttctgtctcacctgcaaaggaaaaggagcgcagccgcacacctgatggcagcaggagcccaaggagccccagcccaagggatgatgtgagcccaccaccaaaggataatggtgcacgcaacggctcagaccgtgaagacagccctggggccagggagaacagcaagaggagtcggagcccatctgatggctaccgtagccctgcggccaatgggcgcagcccgagccctagggatgaccgtagcccaagccccaagggtgacaacggcgatgacgagcgccgtggttcaccaagaggaagtcagtccccctga

SEQ ID NO: 174 - protein, 312 aa, Saccharum officinarum
MPRYDDRYGNTRLYVGRLAPRTRSRDLEYLFSKYGRIREVELKRDYAFIEFSDPQDADDAQYNLDGREVDGSRIIVEFAKGVPRGSSGSREYMGRGPPPGTGRCFNCGIDGHWARDCKAGDWKNKCYRCGERGHIERNCQNSPRNLRRERSYSRSPSPRRGRGRSRSYSRSRSYSRSRSPSGSPRGGRRDRDERRSRSVSYSRSASPRRSVSPAKEKERSRTPDGSRSPRSPSPRDDVSPPPKDNGARNGSDREDSPGARENSKRSRSPSDGYRSPAANGRSPSPRDDRSPSPKGDNGDDERRGSPRGSQSP

SEQ ID NO: 175 - DNA, 942 bp, Brassica napus
atgcctagatatgatgatcgttacgggaacactcgtctgtacgttggacacttatcatccagaactcgtaccagagaccttgaacgccttttcaacagatacggaagagtgcgagatgtggatatgaagcgggattatgcctttgttgaatttagtgatccccgtgatgctgatgacgcgagacattacttggatggaagagactttgacggaagtcgcatcacagtggagttttcaagaggggcacctcgtggctctcgggattatgacagcagaggcccacctcctggagcaggtcgctgctttaactgtggtcttgacggtcattgggcccgagactgcactgcaggagactggaagaacaagtgttaccgctgtggtgaaagaggacatattgagagaaactgcaagaacagtcccaagaagctcaggcggagtggaagctactccaggtcacctgtaagatcccgttctcctcgtcgtagaagaagcccaagccgtagcaggagtcttagccgtagccgaagctacagccgctcaagatcccctgtgaaaagaagagagagaagtgcagaggagagatctcgcagtccaaaaagaatggaggactctctatcgccaagaggcagagaccgtagtccgattatagatgatgaaggtagcccaaggatcatagacggagccctccaccttctccaaagcttgaaaagccagcaggatcagaccatgatggtggtagcagccctcaagacaatggtaatggaagaaacactgttgccagtcctgctgtgggacgcagtgccgacagtccgagagaagaccggagccccgttgatgatgattacgaggccaaccgtgcttcacctagaggaagcgagtctccttgactttgatggctcatggcctcagggttactggtgctctagcatgttgtactattga

SEQ ID NO: 176 - protein, 313 aa, Brassica napus
MPRYDDRYGNTRLYVGHLSSRTRTRDLERLFNRYGRVRDVDMKRDYAFVEFSDPRDADDARHYLDGRDFDGSRITVEFSRGAPRGSRDYDSRGPPPGAGRCFNCGLDGHWARDCTAGDWKNKCYRCGERGHIERNCKNSPKKLRRSGSYSRSPVRSRSPRRRRSPSRSRSLSRSRSYSRSRSPVKRRERSAEERSRSPKRMEDSLSPRGRDRSPIIDDEGSPRIIDGALHLLQSLKSQQDQTMMVVAALKTMVMEETLLPVLLWDAVPTVREKTGAPLMMITRPTVLHLEEASLLDFDGSWPQGYWCSSMLYY

SEQ ID NO: 177 - DNA, 945 bp, Aquilegia sp.
atgcctcgttatgatgatcgtgatcgctatggcaacagtacgcgcctttatgttggtcatttgtcttctcgaacacgctctcgtgatttggaagacctattcagcagatatggaagagtacgcgatgtggatttgaagcacgacttcgcctttattgaatttagtgatcctcgagatgctgatgatgctagatatagcttaaatggtcgaccaattgatggaagccgcattgtggtggaatttgctaaagggggaccacgtggtgcagccagttctagggagtatctgggtagaggccctcctcctggatctggtcggtgcttcaattgtgggattgatggtcactgggcacgagattgcaaagctggtgattggaaaaataagtgctatcgctgtggtgaacgaggtcacatagagcgcaactgtcagaatagcccgaagagtctaaagcgtgggcggagttattcacaatctagatcccctcctcgacgtggtagaagccgaagccgaagtttcagccgaagtcgcagttatagccgatcgcgaacacctccaaagagagagcgaagccttgagcgtgaggaaaggagatcaaggagccctcgctacagtaggagcccaaaatcaaagaagagttccccacctccatcaaaaggtaggaagcgcagtccaacacctggcgatgacaggccccaagcaagaggaagtcctccagctaacaataggcaagatgttcagcttgatggttctgattacagtgggagccctaggggtaagagcagaagccccagtcctgttggtaaaaggtttgaaagcccttctgaagcaaatggccatagccgcagtctcagtcccagggatgataggagcccaatggatgacgatggcaatgaaaggcttgcttcgcctagaggcagtgagtcaccttcgagtgcgcaagattaa

SEQ ID NO: 178 - protein, 314 aa, Aquilegia sp.
MPRYDDRDRYGNSTRLYVGHLSSRTRSRDLEDLFSRYGRVRDVDLKHDFAFIEFSDPRDADDARYSLNGRPIDGSRIVVEFAKGGPRGAASSREYLGRGPPPGSGRCFNCGIDGHWARDCKAGDWKNKCYRCGERGHIERNCQNSPKSLKRGRSYSQSRSPPRRGRSRSRSFSRSRSYSRSRTPPKRERSLEREERRSRSPRYSRSPKSKKSSPPPSKGRKRSPTPGDDRPQARGSPPANNRQDVQLDGSDYSGSPRGKSRSPSPVGKRFESPSEANGHSRSLSPRDDRSPMDDDGNERLASPRGSESPSSAQD

SEQ ID NO: 179 - DNA, 945 bp, Pinus pinuster
atgccccgctatgatgatcgttctggaaacacacggctctatgttggccgactgtcctctcgtacccgtacacgtgatcttgaggatcttttcaacagatatggaagagtccgtgatgtggatttgaagcacgacttcgcctttattgaatttagtgatcctcgtgatgcggatgaagcaagatactatctcaatggaagagatctggatgggagtcgcattgttgtggaatttgcaagagggggaccacgaggagctggtcgaactagagaatatctaggaaggggccctccccctgggtctgggcggtgcttcaattgtgggaatgatggccattgggctcgagactgtaaagcaggggattggaaaaacaaatgttatcgttgtggtgagcgtggtcatattgaaagaaactgtcaaaacagtccaaaatcaaccaggcgtgagcggtctatttcaagatcacgttctaggtcattgtcgcatcgtcgtggaagaagccgcagtctaagctacaacagccgaagtcgcagctacagtcgatcccccagatcaccaaggacagatggccgtagtgcagttcaggttgaaaggagatcaagaagtcgaagttacagtcacagtcctaggagggcaaggagacaaagctcagaaataggtggtcgcaggagcagcagtcgttcagctgacaatgcaagtggccagaggggcagtagatatagtccgaaacgaaacaatcgcaggagtgacagtccagcactagatactgaccgtgcgtcaagggacattgctagtcctcagagggatactcctgtaagatcccaaagtccagctgcaaacggcaagcccagtcatgatgtaagcccagatgccatgaaaaatcaaagctcaagcccaatcagagattcatctgctttcagagagagccctggaactagttcttga

SEQ ID NO: 180 - protein, 314 aa, Pinus pinuster
MPRYDDRSGNTRLYVGRLSSRTRTRDLEDLFNRYGRVRDVDLKHDFAFIEFSDPRDADEARYYLNGRDLDGSRIVVEFARGGPRGAGRTREYLGRGPPPGSGRCFNCGNDGHWARDCKAGDWKNKCYRCGERGHIERNCQNSPKSTRRERSISRSRSRSLSHRRGRSRSLSYNSRSRSYSRSPRSPRTDGRSAVQVERRSRSRSYSHSPRRARRQSSEIGGRRSSSRSADNASGQRGSRYSPKRNNRRSDSPALDTDRASRDIASPQRDTPVRSQSPAANGKPSHDVSPDAMKNQSSSPIRDSSAFRESPGTSS

SEQ ID NO: 181 - DNA, 945 bp, Panicum virgatum
atgcctcgctatgatgatcgttatgggaacacacgcttgtatgttggcagactgtcctcccgcactcgttcccgtgacctggaatatcttttcagcaaacatggaagaatacgagaagtggagttgaagcgcgactatgcatttattgaattcagcaatcctcgtgatgctgatgatgcacaatacaacctagatggcagggaagttgatgggagccgcatcattgttgagtttgctaaaggggttcctcgtggttctggtggctcacgtgagtacatgggaagagggcctccgccagggacaggtcgttgttttaactgtggaattgatggtcactgggcaagggactgcaaggctggtgactggaagaacaaatgctaccgttgtggagaaaggggccacatagaaagaaattgccagaacagtccccagaatctcaggcgtgagagaagttattcacggtcaccatctccacaccgtggacgggggcgcagccggagctacagcagaagccgtagctatagccgttctagatccccatctggatctcccaggggtggacgccgagaccgtgatgagaggagatcaaggagtcttagctacagcaggagccccaggcgttctgcttcaccaagtgctaaggaaaaggagcgcagccccacacccaacggcagtaggagcccaaggagtcccagcccaagggatcaggtgagcccgccaccaaaggacaatggtgaacgcaatggctcagaccgtggtgacagccctgcgaagagggagaacagcaggagcaggagcaggagccgtagcccatctgatggctaccgtagccctgcagccaatgggcgcagcccgagccctagagatgaccggagccctagtcccaaaggcaatgctggtgatgatgatgaccgtggttcaccaagaggaagccagtccccctga

SEQ ID NO: 182 - protein, 314 aa, Panicum virgatum
MPRYDDRYGNTRLYVGRLSSRTRSRDLEYLFSKHGRIREVELKRDYAFIEFSNPRDADDAQYNLDGREVDGSRIIVEFAKGVPRGSGGSREYMGRGPPPGTGRCFNCGIDGHWARDCKAGDWKNKCYRCGERGHIERNCQNSPQNLRRERSYSRSPSPHRGRGRSRSYSRSRSYSRSRSPSGSPRGGRRDRDERRSRSLSYSRSPRRSASPSAKEKERSPTPNGSRSPRSPSPRDQVSPPPKDNGERNGSDRGDSPAKRENSRSRSRSRSPSDGYRSPAANGRSPSPRDDRSPSPKGNAGDDDDRGSPRGSQSP

SEQ ID NO: 183 - DNA, 945 bp, Zea mays
atgcctcgttatgatgatcgccatgggaatacacgcttgtatgttggaagattggcccctcgcacccgttcccgcgacctagaatatcttttcagcaaatatggaagaatacgtgaagtggagttgaagcgtgactatgcattcattgaattcagtgacccccgtgatgctgatgatgcgcagtacaacctagatggcagggaagtcgatggaagccgtattattgttgaatttgctaaaggagttcctcgtggttctggtggttcacgtgagtacatgggaagaggacctccaccaggaacaggtcgttgttttaactgtggaatggatggtcactgggcaagggactgcaaggctggtgactggaagaacaaatgctaccgctgtggtgaatcgggccatatagagagaaattgccagaacagtccaaggaatctcaggcgtgataaaagctattcacggtctccatccccacgtggtggacgtggccgcagccggagctacagcagaagccggagctatagccgatccagatccccatctggatctcccaggggtggacgccgtgaacgtgacgagaggagatctaggagtcttagctacagcaggagcgcaagccccaggcgttctgtctcacctgcaaaggaaaaggagcgcagtcgcacacccaatggcagtaggagcccaaggagccccagcccaagggctgaggtgagcccaccactgaaggataatggtgcacgcaatggctcagaccatgaaggcaaccctggtggtggagagaacagcaagaggagtcggagcccatctgatggctaccgtagccctgtggccaatgggcgcagcccgagcccgagggacgatcggagcccaagccccaagggcaacaacgaagatgacgagcgccgtggttcacctagaggaagtcagtcccccctgaactga

SEQ ID NO: 184 - protein, 314 aa, Zea mays
MPRYDDRHGNTRLYVGRLAPRTRSRDLEYLFSKYGRIREVELKRDYAFIEFSDPRDADDAQYNLDGREVDGSRIIVEFAKGVPRGSGGSREYMGRGPPPGTGRCFNCGMDGHWARDCKAGDWKNKCYRCGESGHIERNCQNSPRNLRRDKSYSRSPSPRGGRGRSRSYSRSRSYSRSRSPSGSPRGGRRERDERRSRSLSYSRSASPRRSVSPAKEKERSRTPNGSRSPRSPSPRAEVSPPLKDNGARNGSDHEGNPGGGENSKRSRSPSDGYRSPVANGRSPSPRDDRSPSPKGNNEDDERRGSPRGSQSPLN

SEQ ID NO: 185 - DNA, 951 bp, Aquilegia sp.
atgcctcgttatgatgatcgtgatcgctatggcaacagtacgcgcctttatgttggtcatttgtcttctcgaacacgctctcgtgatttggaagacctattcagcagatatggaagagtacgcgatgtggatttgaagcacgacttcgcctttattgaatttagtgatcctcgagatgctgatgatgctagatatagcttaaatggtcgaccaattgatggaagccgcattgtggtggaatttgctaaagggggaccacgtggtgcagccagttctagggagtatctgggtagaggccctcctcctggatctggtcggtgcttcaattgtgggattgatggtcactgggcacgagattgcaaagctggtgattggaaaaataagtgctatcgctgtggtgaacgaggtcacatagagcgcaactgtcagaatagcccgaagagtctaaagcgtgggcggagttattcacaatctagatcccctcctcgacgtggtagaagccgaagccgaagtttcagccgaagtcgcagttatagccgatcgcgaacacctccaaagagagagcgaagccttgagcgtgaggaaaggagatcaaggagccctcgctacagtaggagcccaaaatcaaagaagagttccccacctccatcaaaaggtaggaagcgcagtccaacacctggcgatgacaggccccaagcaagaggaagtcctcctcctccagctaacaataggcaagatgttcagcttgatggttctgattacagtgggagccctaggggtaagagcagaagccccagtcctgttggtaaaaggtttgaaagcccttctgaagcaaatggccatagccgcagtctcagtcccagggatgataggagcccaatggatgacgatggcaatgaaaggcttgcttcgcccagaggcagtgagtcaccttcgagtgcgcaagattaa

SEQ ID NO: 186 - protein, 316 aa, Aquilegia sp.
MPRYDDRDRYGNSTRLYVGHLSSRTRSRDLEDLFSRYGRVRDVDLKHDFAFIEFSDPRDADDARYSLNGRPIDGSRIVVEFAKGGPRGAASSREYLGRGPPPGSGRCFNCGIDGHWARDCKAGDWKNKCYRCGERGHIERNCQNSPKSLKRGRSYSQSRSPPRRGRSRSRSFSRSRSYSRSRTPPKRERSLEREERRSRSPRYSRSPKSKKSSPPPSKGRKRSPTPGDDRPQARGSPPPPANNRQDVQLDGSDYSGSPRGKSRSPSPVGKRFESPSEANGHSRSLSPRDDRSPMDDDGNERLASPRGSESPSSAQD

SEQ ID NO: 187 - DNA, 951 bp, Picea sitchensis
atgccccgctatgatgatcgttctggaaacacacggctctatgttggccgactatcttctcgcacacgtacacgtgatcttgaggatcttttcaacagatatggaagagtccgtgatgtggatttgaagcacgacttcgcctttattgaatttagcgatcctcgtgatgcggatgaagcaagatactatcttaatggaagagatctggatgggagccgcattgttgtggagtttgcaagagggggaccacgaggagctgctgggggtcgaactagagaatatctgggaagaggccctccccctgggtctgggcgatgcttcaattgtggcaatgatggccattgggctcgagactgtaaagctggggattggaaaaataaatgttatcgctgtggtgagcggggtcatattgaaagaaactgtcaaaacagtccaaaatcaaccaggcgtgagcggtctgtttcaagatcaccttccaggtcattgtcgcgtcgtcgtggaagaagccgtagtgcaagttacaacagcagaagtcgcagctacagtcgatcccccagatcaccaaggacagatggtcgtagtgcagttcaggatgaaaagagatcaagaagtcgaagttacagccacagtcctaggagggcaaggagacaaagcccagaaatggatggtcgtaggagcagcagtccttcagctgacaacgcaagtggccagagaggcactagatatagtccaaaacgaaacagtcgcaggagtgacagtccagcattagatactgaccgtgcatcaagggacattgctagtcctcagagggacagccctggaaggtcccaaagtccagctgcaaatggcaagcccagtcatgatgtaagcccagatactatgaaaaatcaaagcccaagccctatgagagaatcatctgctttcagagagagccctggaactagttcttga

SEQ ID NO: 188 - protein, 316 aa, Picea sitchensis
MPRYDDRSGNTRLYVGRLSSRTRTRDLEDLFNRYGRVRDVDLKHDFAFIEFSDPRDADEARYYLNGRDLDGSRIVVEFARGGPRGAAGGRTREYLGRGPPPGSGRCFNCGNDGHWARDCKAGDWKNKCYRCGERGHIERNCQNSPKSTRRERSVSRSPSRSLSRRRGRSRSASYNSRSRSYSRSPRSPRTDGRSAVQDEKRSRSRSYSHSPRRARRQSPEMDGRRSSSPSADNASGQRGTRYSPKRNSRRSDSPALDTDRASRDIASPQRDSPGRSQSPAANGKPSHDVSPDTMKNQSPSPMRESSAFRESPGTSS

SEQ ID NO: 189 - DNA, 960 bp, Nicotiana tabacum
atgcctcgttatgatgatcgatcgggaaatagcactcgtctctatgtgggccacttgtcttcacggacccgttcacgtgatctggagcgtgtattcagtaaatatgggagagtacgtgatgtggacatgaagcacgactatgccttcgtagaatttagtgatccacgagatgctgatgatgcaagatactatttagatgggcgggacgttgatggccgccgcataattgtggaatttgctaagggagtgccacgtggacctggtggttcgcgtgagtatcttggcaaaggacctgctcctggctcaggccgttgcttcaactgtggccttgaaggtcactgggctcgagattgcaaagctggggattggaagaataaatgttatcggtgtggagaaagaggccatatagaaaaaaaatgcccaaatagtcctaaaaaactcagtcgacgggatcggagctactcacggtcgcctgtcaggtcaaggtcacactcacgttcacgttctcctcgtcgtcgaagttacagcagaagtcgcagctatagtccatcaagatctcctgctccaaggagaggaaaagttgacatagagaggaggtcaagaagctacagtaggagccctgagccaaagaaggctagtccaagtcctagtctgagtcctccaccgaagacaaggaagcatagcccgacacccgaagatggaagccctacggaagcaatgaggacgaccaccagagaagaaggtagctatagccaaagccccagagagagaagtgcaagtcctttaagtcctagacgaggggatagccctgcacctgaaagggatgaggacagccctgctgaagctaacggtggaagtcgcagcccgagtcccaattaccagaggaaccgtgcagatgatgatgaggatgaaggtgagtataataatcaacgctcaggcagagagagcgagtcgccttga

SEQ ID NO: 190 - protein, 319 aa, Nicotiana tabacum
MPRYDDRSGNSTRLYVGHLSSRTRSRDLERVFSKYGRVRDVDMKHDYAFVEFSDPRDADDARYYLDGRDVDGRRIIVEFAKGVPRGPGGSREYLGKGPAPGSGRCFNCGLEGHWARDCKAGDWKNKCYRCGERGHIEKKCPNSPKKLSRRDRSYSRSPVRSRSHSRSRSPRRRSYSRSRSYSPSRSPAPRRGKVDIERRSRSYSRSPEPKKASPSPSLSPPPKTRKHSPTPEDGSPTEAMRTTTREEGSYSQSPRERSASPLSPRRGDSPAPERDEDSPAEANGGSRSPSPNYQRNRADDDEDEGEYNNQRSGRESESP

SEQ ID NO: 191 - DNA, 972 bp, Hordeum vulgare
atgcctcgctatgatgagcgtgatcgttacggcggcaatacaaggctgtacgtgggtcgtcttccctcgcgcacccgcacaagggaccttgaagacctcttcggcagatatgggagagtgcgacatgtggatatgaagcatgagtttgcatttgttgagtttagtgatcccagggatgctgatgaagcaaggtacaaccttgatggtcgtgactttgatggaagccgcatgattgtcgagtttgctaaaggggttccgcgtggccaaggaggaggaggtgaccgtgaccgtggccgtggtggtgaccgtgaatatatgggccgggggcctcctcctggttctggccgctgctttaactgtggcattgatggccattgggctcgtgactgcaaagctggcgactggaaaaataggtgctatcgttgtggagatagtggccatatagaaagggattgtcagaacagccctaagaacctcaagcgtggaaagagttactccagatctccatctcctcgccgcggaagggtgcgcgataggagctacagcaggagtcgcagtaggagctacagccgctctgtttccccaaggagggatgaaaggcgctcaaggagcccccgtgacagtcgcagcccaaggaggagcccccgtgacagtcgcagccctaggaggagcccccgagacagtcgcagccctatgaagagcccccgtggcagtcgcagccctatgaggagcccccgtgacagccgcagccctaggaggagtgcttcacctgccaaggggagggcccggagccccacccctcctggcagcagaagccctgcaccaagggagaacagcaggagtccgatgaaggctgacagccctaataacatgagcccagctgcaaatggtcgtagcccgagccccagggacggcgaagacaatggcaaccatcgtgcacccagtggaagtgcatcacccggtggtggttaa

SEQ ID NO: 192 - protein, 323 aa, Hordeum vulgare
MPRYDERDRYGGNTRLYVGRLPSRTRTRDLEDLFGRYGRVRHVDMKHEFAFVEFSDPRDADEARYNLDGRDFDGSRMIVEFAKGVPRGQGGGGDRDRGRGGDREYMGRGPPPGSGRCFNCGIDGHWARDCKAGDWKNRCYRCGDSGHIERDCQNSPKNLKRGKSYSRSPSPRRGRVRDRSYSRSRSRSYSRSVSPRRDERRSRSPRDSRSPRRSPRDSRSPRRSPRDSRSPMKSPRGSRSPMRSPRDSRSPRRSASPAKGRARSPTPPGSRSPAPRENSRSPMKADSPNNMSPAANGRSPSPRDGEDNGNHRAPSGSASPGGG

SEQ ID NO: 193 - DNA, 972 bp, Triticum aestivum
atgcctcgctacgatgagcgtgatcgttatggcggcaacacaaggctgtacgtgggtcgtcttccctcgcgcacccgcacaagggaccttgaagacctcttcggcagatatgggagagtgcgacatgtggatatgaagcacgagtttgcatttgttgagtttagtgatcccagggatgctgatgaagcaaggtacaatcttgatggtcgtgactttgatggaagccgcatgattgttgagtttgctaaaggggttccgcgtggccaaggaggaggaggtgaccgtgaccgtggccgtggtggtgaccgtgaatatatgggtcggggacctcctcctggttctggccgttgctttaactgtgggattgatgggcattgggctcgtgactgcaaagctggcgactggaaaaataggtgctatcgttgtggagatagtggccacatagaaagggattgccagaacagccctaagaacctcaagcgtggaaagagttactccagatctccatctcctcgccgcggaagggtgcgtgataggagctacagcaggagccgcagtaggagctacagccgctctgtttccccaaggagggatgaaaggcgatcaaggagccctcgcgacagtcgcagcccaaggaggagcccccgtgacagtctcagccccaggaggagcccccgcaacagtcgcagccctatgaagagcccccgtggcagtcgcagccctatgaggagcccccgtgacagtcgcagccctaggaggagtgcttcacctgccaaggggagggcccggagccccacccctcctggcagcaggagccctgcaccaagggataacagcaggagcccaatgaaggctgacagccctaaaaacatgagcccagctgccaatggtcgtagcctgagccccagggacggcgaagacaatggccaccaccgtgcacccagtggaagtgcatcacccggtggtggttag

SEQ ID NO: 194 - protein, 323 aa, Triticum aestivum
MPRYDERDRYGGNTRLYVGRLPSRTRTRDLEDLFGRYGRVRHVDMKHEFAFVEFSDPRDADEARYNLDGRDFDGSRMIVEFAKGVPRGQGGGGDRDRGRGGDREYMGRGPPPGSGRCFNCGIDGHWARDCKAGDWKNRCYRCGDSGHIERDCQNSPKNLKRGKSYSRSPSPRRGRVRDRSYSRSRSRSYSRSVSPRRDERRSRSPRDSRSPRRSPRDSLSPRRSPRNSRSPMKSPRGSRSPMRSPRDSRSPRRSASPAKGRARSPTPPGSRSPAPRDNSRSPMKADSPKNMSPAANGRSLSPRDGEDNGHHRAPSGSASPGGG

SEQ ID NO: 195 - DNA, 975 bp, Oryza sativa
atgcctcgctatgatgaccgtgatcgctacgatgaccgttacggcggcaacacgaggctgtacgtaggtcgtctttcctcgcgcacccggacccgggaccttgaagaccttttcggcagatatgggagagtgcgatatgtggatatgaagcacgagtttgcatttgttgaatttagtgatgctcgggatgctgatgaggcaaggtacaacctggatggtcgggactttgatggaagccgcatgattgttgagtttgctaaaggggttccacgtggccctggaggatcacgtgaatatatgggcagaggaccaccacctggttctggccgctgctttaactgtgggattgatgggcactgggcccgtgactgcaaagctggagactggaaaaacagatgctatcggtgtggagacaggggccatatagaaagggactgccggaacagccctaagaatctcaagcgtggaagaagctactcaagatccccatcccctcgtcgtgggaggagccgtggtaggagctacagcaggagccgtagcaggagctacagccgctcccagtctccaaggagggatagccgtaatgaaaggagatcaaggagccctcgtgacagtcggagccctaggggaagcccccgtgacagtcgcagccctagggggagcccccgtgacagtcgcagccctaaggggagccctcgcgacacccagagccctaggggaagccctcgtgatagccgcagccctaggagaagtgcttcaccacccaacgggaggaaccgcagccctacccctaatgccagcaggagtcctgcaccaagggacagcaggagcccaatgagagctgacagccgtagccctgctgaccatgagcgccgtgacatgagtacagctgccaatggccggagcccaagccccagggattatgaagacaatggcaatcatcgggcctcgcctagaggaagcgcatccccttga

SEQ ID NO: 196 - protein, 324 aa, Oryza sativa
MPRYDDRDRYDDRYGGNTRLYVGRLSSRTRTRDLEDLFGRYGRVRYVDMKHEFAFVEFSDARDADEARYNLDGRDFDGSRMIVEFAKGVPRGPGGSREYMGRGPPPGSGRCFNCGIDGHWARDCKAGDWKNRCYRCGDRGHIERDCRNSPKNLKRGRSYSRSPSPRRGRSRGRSYSRSRSRSYSRSQSPRRDSRNERRSRSPRDSRSPRGSPRDSRSPRGSPRDSRSPKGSPRDTQSPRGSPRDSRSPRRSASPPNGRNRSPTPNASRSPAPRDSRSPMRADSRSPADHERRDMSTAANGRSPSPRDYEDNGNHRASPRGSASP

SEQ ID NO: 197 - DNA, 978 bp, Zea mays
atgcctcgttatgatgatcgccatgggaatacacgcttgtatgttggaagattggcccctcgcacccgttcccgcgacctagaatatcttttcagcaaatatggaagaatacgtgaagtggagttgaagcgtgactatgcattcattgaattcagtgacccccgtgatgctgatgatgcgcagtacaacctagatggcagggaagtcgatggaagccgtattattgttgaatttgctaaaggagttcctcgtggttctggtggttcacgtgagtacatgggaagaggacctccaccaggaacaggtcgttgttttaactgtggaatggatggtcactgggcaagggactgcaaggctggtgactggaagaacaaatgctaccgctgtggtgaatcgggccatatagagagaaattgccagaacagtccaaggaatctcaggcgtgataaaagctattcacggtctccatccccacgtggtggacgtggccgcagccggagctacagcagaagccggagctatagccgatccagatccccatctggatctcccaggggtggacgccgtgaacgtgacgagaggagatctaggagtcttagctacagcaggagcgcaagccccaggcgttctgtgtcacctgtaaaggaaaaggagcgcagccgcacacctgatggcagtaggagccccagcccaagggacaaggtgagcccaccaccaaaggataatggtgcccacaatggctcggaccgtgaagacagccctgggggcagggagatgagcaagaggagtcggagcccgtctgatggctaccgtagccctgtgggcaatgggcgcagcccgagccgtagcccaagccccaaggtcaacaatggtgatgacccaagccccaagggcaacaatggtgacgacccaagccccaagggcaacaatggtgatgacgagcaccgcggttcaccaagaggaagtcagtccccctga

SEQ ID NO: 198 - protein, 325 aa, Zea mays
MPRYDDRHGNTRLYVGRLAPRTRSRDLEYLFSKYGRIREVELKRDYAFIEFSDPRDADDAQYNLDGREVDGSRIIVEFAKGVPRGSGGSREYMGRGPPPGTGRCFNCGMDGHWARDCKAGDWKNKCYRCGESGHIERNCQNSPRNLRRDKSYSRSPSPRGGRGRSRSYSRSRSYSRSRSPSGSPRGGRRERDERRSRSLSYSRSASPRRSVSPVKEKERSRTPDGSRSPSPRDKVSPPPKDNGAHNGSDREDSPGGREMSKRSRSPSDGYRSPVGNGRSPSRSPSPKVNNGDDPSPKGNNGDDPSPKGNNGDDEHRGSPRGSQSP

SEQ ID NO: 199 - DNA, 978 bp, Zea mays
atgcctcgcaatgatgatcgctatgggaatacacgcttgtatgttggaagattgtctccccgcacccgttctcgtgacctagaataccttttcagcaaatatgggagaattcgagaagtggagttgaagcgtgactatgcattcattgaattcagtgacccccgtgatgctgatgatgcacagtacaacctagatggcagggacgtcgatggaagccgcattattgttgaatttgctaaaggggttcctcgtggttctggtggttcacgtgattacaacggaagaggacctccaccaggaacaggccgttgttttaactgtggagttgatggtcactgggcaagagactgtcaggctggtgactggaagaacaaatgctaccgttgtggcgaaaggggccatatagaaagaaattgccagaacagtccaaggaacctcaggcgtgagagaagctattcacggtctccatccccacgccgaggacggggccgcagccggagctacagcagaagccggagctatagccgatccagatccccgtctggatctcctaggggtggacgccgagaccgtgatgagaggagatcaaggagtcttagctacagcaggagcgcaagccctaggcgttctgtgtcacctgtaaaggaaaaggagcgcagccgcacacctgatggcagtaggagccccagcccaagggacaaggtgagcccaccaccaaaggataatggtgcccacaatggctcggaccgtgaagacagccctgggggcagggagatgagcaagaggagtcggagcccgtctgatggctaccgtagccctgtgggcaatgggcgcagcccgagccgtagcccaagccccaaggtcaacaatggtgatgacccaagccccaagggcaacaatggtgacgacccaagccccaagggcaacaatggtgatgacgagcaccgcggttcaccaagaggaagtcagtccccctga

SEQ ID NO: 200 - protein, 325 aa, Zea mays
MPRNDDRYGNTRLYVGRLSPRTRSRDLEYLFSKYGRIREVELKRDYAFIEFSDPRDADDAQYNLDGRDVDGSRIIVEFAKGVPRGSGGSRDYNGRGPPPGTGRCFNCGVDGHWARDCQAGDWKNKCYRCGERGHIERNCQNSPRNLRRERSYSRSPSPRRGRGRSRSYSRSRSYSRSRSPSGSPRGGRRDRDERRSRSLSYSRSASPRRSVSPVKEKERSRTPDGSRSPSPRDKVSPPPKDNGAHNGSDREDSPGGREMSKRSRSPSDGYRSPVGNGRSPSRSPSPKVNNGDDPSPKGNNGDDPSPKGNNGDDEHRGSPRGSQSP

SEQ ID NO: 201 - DNA, 993 bp, Oryza glaberrima
atgcctcactatgatgatcattatggaagcacacgcttgtatgttggtagactgtcttcgcgcactcgttctcgtgacctagaatatcttttcggcagatatggaagaatacgtgaagtggagttgaagcgcgactacgcgtttattgaattcagtgatccccgtgatgctgatgaagcgcggtataacctagatggcagggatgttgatggaagccgcattcttgttgagtttgctaaaggagttccacgtggtgctgctggtggttcacgtgaatatatggggagaggacctcctccaggaacaggtcgctgttttaactgtgggattgatggtcactgggcaagagactgcaaggctggtgactggaagaacaaatgttaccgttgtggagaaagaggtcacatagaaagaaactgccaaaacagtccaagaaatctcaggcgagagagaagttattcgcgctccccatcgccacgccgtggacgtggtcatggtcgtagtcgtagctatagccggagccggagcaggagttacagccgatctaggtccagatccctatctggatctcccaggggacgcagagatcgtgatgataggagatcaaggagtcttagctacagcagaagtcccaggcgatccatctcccgagcagcaaatggaaaggagcgcagccccagcccgaatggtaggcggagtccaaggagtccacaggatcgggtaagcccaccacccaaggataatgatgagcgcaatggtgacagcccccggggcagggagaacagcaggagcccatctgacggctatcgtagccctgtggctgccaatgggcgcagcccaagcccaaggaacaatggaagccctagtccaatggacaacaatagccgaagcccaagggacaacggcagcccgagccctagggatggaaatggtgatggtggtagccgtggcggctcacgctcgcccagagcaagcgagtcccctgaagcttga

SEQ ID NO: 202 - protein, 330 aa, Oryza glaberrima
MPHYDDHYGSTRLYVGRLSSRTRSRDLEYLFGRYGRIREVELKRDYAFIEFSDPRDADEARYNLDGRDVDGSRILVEFAKGVPRGAAGGSREYMGRGPPPGTGRCFNCGIDGHWARDCKAGDWKNKCYRCGERGHIERNCQNSPRNLRRERSYSRSPSPRRGRGHGRSRSYSRSRSRSYSRSRSRSLSGSPRGRRDRDDRRSRSLSYSRSPRRSISRAANGKERSPSPNGRRSPRSPQDRVSPPPKDNDERNGDSPRGRENSRSPSDGYRSPVAANGRSPSPRNNGSPSPMDNNSRSPRDNGSPSPRDGNGDGGSRGGSRSPRASESPEA

SEQ ID NO: 203 - DNA, 993 bp, Oryza sativa
atgcctcgctatgatgatcattatggaagcacacgcttgtatgttggtagactgtcttcgcgcactcgttctcgtgacctagaatatcttttcggcagatatggaagaatacgtgaagtggagttgaagcgcgactacgcgtttattgaattcagtgatccccgtgatgctgatgaagcgcggtataacctagatggcagggatgttgatggaagccgcattcttgttgagtttgctaaaggagttccacgtggtgctgctggtggttcacgtgaatatatggggagaggacctcctccaggaacaggtcgctgttttaactgtgggattgatggtcactgggcaagagactgcaaggctggtgactggaagaacaaatgttaccgttgtggagaaagaggtcacatagaaagaaactgccaaaacagtccaagaaatctcaggcgagagagaagttattcgcgctccccatcgccacgccgtggacgtggtcatggtcgtagtcgtagctatagccggagccggagcaggagttacagccgatctaggtccagatccctatctggatctcccaggggacgcagagatcgtgatgataggagatcaaggagtcttagctacagcagaagtcccaggcgatccatctccccagcagcaaatggaaaggagcgcaaccccagcccgaatggtaggcggagtccaaggagtccacaggatcgggtaagcccaccacccaaggataatgatgagcgcaatggtgacagcccctggggcagggagaacagcaggagcccatctgacggctaccgtagccctgtggctgccaatgggcgcagcccaagcccaaggaacaatggaagccctagtccaatggacaacaatagccgaagcccaagggacaacggcagcccgagccctagggatggaaatggtgatggtggtagccgtggcggctcacgctcgcccagagcaagcgagtcccctgaagcttga

SEQ ID NO: 204 - protein, 330 aa, Oryza sativa
MPRYDDHYGSTRLYVGRLSSRTRSRDLEYLFGRYGRIREVELKRDYAFIEFSDPRDADEARYNLDGRDVDGSRILVEFAKGVPRGAAGGSREYMGRGPPPGTGRCFNCGIDGHWARDCKAGDWKNKCYRCGERGHIERNCQNSPRNLRRERSYSRSPSPRRGRGHGRSRSYSRSRSRSYSRSRSRSLSGSPRGRRDRDDRRSRSLSYSRSPRRSISPAANGKERNPSPNGRRSPRSPQDRVSPPPKDNDERNGDSPWGRENSRSPSDGYRSPVAANGRSPSPRNNGSPSPMDNNSRSPRDNGSPSPRDGNGDGGSRGGSRSPRASESPEA

SEQ ID NO: 205 - DNA, 993 bp, Panicum virgatum
atgcctcgctatgatgatcgctatggaggaacgcgcttgtatgttggcagattggcctcccgtactcgttcccgcgacctagaatatctgttcagcagatatggaagaatacgagaagtggagttgaagcgcgactatgcattcattgagttcagtgatcctcgtgatgctgatgatgcgcgatacaacctagatggcagggatgttgatgggagtcgcattattgttgagtttgctaaaggcgttccacgcggaccaggtggctcacgtgaatccatgggaagaggccctcccccgggaacaggtcgttgtttcaactgtggaattgatggtcactgggcgagagactgtaaggctggtgactggaaaaataaatgctaccgatgtggagaaaggggacatatagaaagaaattgccagaacagccctaggagtatcaggcgtgagagaagctactcacggtccccatctccacgccatggacggggccgcagtcggagctacagcagaagtcggagccggagccgtagcaatagccgctcaagatccctatctggatctcctaggggaggccgccgtgaccgtggtgagaggagatcaaggagccttagctacagcaggagccccatgcgatctgcctcccctcctgcaaaggagcacagccgtacacctgatggaagcaggagcccaaggagtcccagtccccggggtcaggtgagcccaccgccaaaggataacggtgagcgcaatggctcagaccgtggtgatagccctggagggatggagaaggagaacagcaggagtagaagccggagcccatctgatggcaaccgcagccctgcggccaatgggcgtagcccaagtcctagggatgaccgtagcccaagccctactaggggtgaccgcagtccaagtcccaagggcaatggtaacaatgatgatgatcatgatgatgaccggcaggcttcacccacaggaagcaagtccccctga

SEQ ID NO: 206 - protein, 330 aa, Panicum virgatum
MPRYDDRYGGTRLYVGRLASRTRSRDLEYLFSRYGRIREVELKRDYAFIEFSDPRDADDARYNLDGRDVDGSRIIVEFAKGVPRGPGGSRESMGRGPPPGTGRCFNCGIDGHWARDCKAGDWKNKCYRCGERGHIERNCQNSPRSIRRERSYSRSPSPRHGRGRSRSYSRSRSRSRSNSRSRSLSGSPRGGRRDRGERRSRSLSYSRSPMRSASPPAKEHSRTPDGSRSPRSPSPRGQVSPPPKDNGERNGSDRGDSPGGMEKENSRSRSRSPSDGNRSPAANGRSPSPRDDRSPSPTRGDRSPSPKGNGNNDDDHDDDRQASPTGSKSP

SEQ ID NO: 207 - DNA, 996 bp, Physcomitrella patens
atgtctcgatatgatgatcgctacagaggcagcgacaggcgcgatgatcgaggcggaggtggaggaggttaccgtggtggtggtggtggtggtagaggtgccgatactggccctgatgctggagccactcgtttgtatgtcggccgtctttctacccgaacaagaagccgagatttggaagacctcttcgcgaaatatgggagagttcgagacgtggatgtgaagcacgactttgcctttgttgaattcgccgatgctcgagatgcggatgatgcaagacattatgtgaacgggaaagactttgatggcaacaggctcattgttgagtttgcgaggaggggaccccgcggtgcctcaggtggtgctcgtgaatatcttgggagaggcccgcctcctggcactggtcgttgttataattgtggaaatgatggccattgggcgagagattgcaaagcaggtgattggagggataagtgctatcggtgcggccagcgtgggcacatagagcgtaattgccgcaacagtccaaggccgacaagcagtccgtcgcgttcccgctctcggtctcctcgagggcacaagaggtcgtctcgcagaagtgtttcccgtagccgaagtcgcagcttcagtcgttcacctcctcgaaggggtcgtagtcctgctaaggctgaccgcagtcccatgaaggatgatcgtagtcctgccaagggtgaccgtagaaagtcagatcgcagcaaaagcaggagcctgactcctctgcctaaggatgagaaacgtagtctttctcccagccctgtccccaacgggagaagtataagcagaagccccggagctcgtagtccgagtccagaggctcatcgtggtgagcaaagtcctccaccccgagagaagaggcgtagtatcagccctagcccagagcaagacttggataagggtagtcctgctaaggatctttcacccctacctcgaaggagtcttactcccgaagaagagtga

SEQ ID NO: 208 - protein, 331 aa, Physcomitrella patens
MSRYDDRYRGSDRRDDRGGGGGGYRGGGGGGRGADTGPDAGATRLYVGRLSTRTRSRDLEDLFAKYGRVRDVDVKHDFAFVEFADARDADDARHYVNGKDFDGNRLIVEFARRGPRGASGGAREYLGRGPPPGTGRCYNCGNDGHWARDCKAGDWRDKCYRCGQRGHIERNCRNSPRPTSSPSRSRSRSPRGHKRSSRRSVSRSRSRSFSRSPPRRGRSPAKADRSPMKDDRSPAKGDRRKSDRSKSRSLTPLPKDEKRSLSPSPVPNGRSISRSPGARSPSPEAHRGEQSPPPREKRRSISPSPEQDLDKGSPAKDLSPLPRRSLTPEEE

SEQ ID NO: 209 - DNA, 996 bp, Saccharum officinarum
  misc_feature (699)..(699): n is a, c, g, or t
  misc_feature (857)..(857): n is a, c, g, or t
atgcctcgctatgatgaccgctatggaggcacgcgcttgtatgttggcagattggcccctcgtactcgttcccgcgatttagaaaatctgttcggcagatatggaagaatacgagaagtggagttgaagcgcgactatgcatttattgagttcagtgatcatcgtgatgctgatgaggctcgataccaactagatggcagggatgttgatgggagtcgcattgttgttgagtttgccaaaggggtcccacgtggtccagctggctcacgtgaatatatgggaagaggccctccaccaggtacaggtcgttgtttcaactgtggaattgatggtcactgggcaagagactgtaaggctggtgactggaaaaacaaatgctaccgttgtggagaaagagggcatatagaaagaaattgccagaacagtcctaggagtgtcaggcgtgaaagaagttactcacggtccccaactccacgccgtggaaggggtcgcagtccaagctatagcaggagcaggagcaggagccggagctatagccggtcgagatccctgtctggatctcctaggggaggtcgccgtgaccgtaaccgtgacgataggagatcaaggagccttagctacagcaggagtcccatgcgatctgcctcgccacctccaaaggaaagggagcgcagccccacacctaatggaagcaggagncccaggagtcgcagcccccaggatcaggtgatgagcccaccaccaaaggataatggcgaaggtaatggttcagaccgtggcgacagccccagagggagggaaaacagcaggagcaggagccgcagcccatcccgtggtaaccgcagccctgcagctantgggagtagcccgagtcctagaggtgaccgtagtccaagccccagggctgaccgtagcccaagccccaagggcaatgtaacaaggacgatgatgatgctgccccccgtggttccccagcaggaagcaagtcacccttga

SEQ ID NO: 210 - protein, 331 aa, Saccharum officinarum
  misc_feature (233)..(233): Xaa can be any naturally occurring amino acid
  misc_feature (286)..(286): Xaa can be any naturally occurring amino acid
MPRYDDRYGGTRLYVGRLAPRTRSRDLENLFGRYGRIREVELKRDYAFIEFSDHRDADEARYQLDGRDVDGSRIVVEFAKGVPRGPAGSREYMGRGPPPGTGRCFNCGIDGHWARDCKAGDWKNKCYRCGERGHIERNCQNSPRSVRRERSYSRSPTPRRGRGRSPSYSRSRSRSRSYSRSRSLSGSPRGGRRDRNRDDRRSRSLSYSRSPMRSASPPPKERERSPTPNGSRXPRSRSPQDQVMSPPPKDNGEGNGSDRGDSPRGRENSRSRSRSPSRGNRSPAAXGSSPSPRGDRSPSPRADRSPSPKGNVTRTMMMLPPVVPQQEASHP

SEQ ID NO: 211 - DNA, 996 bp, Zea mays
atgcctcgctatgatgatcgctatggaggcacgcgcttgtatgttggcagattggccccccgtactcgttctcgtgatttagaatatctcttcggcaaatatggaagaatacgagaagtggagttgaagcgcgactatgcatttattgagttcagtgaacatcgtgatgccgatgaagctcggtaccaactagatggcagggatgtcgatggaagtcgcattgttgttgagtttgctaaaggggtcccacgtggtccaggtggctcacgtgaatatatgggaagaggccctccaccaggcacaggtcgttgtttcaactgtggaatggatggtcactgggcaagagactgtaaggctggtgactggaaaaataaatgctaccgttgtggagaaagagggcatatagaaagaaattgccagaacagtcctaggagcgtcaggcgtgaaagaagttactcacgctccccatctccacgccgtggaagaggtcgcagtccaagctatagcaggagcaggagccggagccggagccggagctatagccgatcgaggtccctatctggatctcctaggggaggccgccgtgaccgtgatgataggagatcgaggagtcttagctacagcaggagccccgtgcggtcgccacctgcaaaggaaaaggagcgcagtcccacacctggcggaagcaggagcccaaggagtcgcagcccacaggatcaggtgatgagcccaccacctaaggataacggcgacaggaatggttcagaccgtggcgacagccccagagggagggaagacagcaggagccgcagccgcagcccatccggtggtaaccgcagccctgcagctaatgggcgtagcccgagccccagaggtgaccgtggcccgagccccatggctgaccgtagcccgagcccaaagggcaatggtaacaacgatggtggtgatgatgatactggccgtggtggttcccccacaggaagcaagtcaccctga

SEQ ID NO: 212 - protein, 331 aa, Zea mays
MPRYDDRYGGTRLYVGRLAPRTRSRDLEYLFGKYGRIREVELKRDYAFIEFSEHRDADEARYQLDGRDVDGSRIVVEFAKGVPRGPGGSREYMGRGPPPGTGRCFNCGMDGHWARDCKAGDWKNKCYRCGERGHIERNCQNSPRSVRRERSYSRSPSPRRGRGRSPSYSRSRSRSRSRSYSRSRSLSGSPRGGRRDRDDRRSRSLSYSRSPVRSPPAKEKERSPTPGGSRSPRSRSPQDQVMSPPPKDNGDRNGSDRGDSPRGREDSRSRSRSPSGGNRSPAANGRSPSPRGDRGPSPMADRSPSPKGNGNNDGGDDDTGRGGSPTGSKSP

SEQ ID NO: 213 - DNA, 999 bp, Mesembryanthemum crystallinum
atgcctcgctacagtgaccgtcacagtagtagcagtacacgcctctatgttggccgcctgtcttcacgtaccaggacccatgatttggaggaccttttcagcagatatggaagagtacgtgacgtggatatgaagcgtgattatgcctttgttgaatatagtgatcctcgtgatgctgatgatgcaagatatagtttaaatggtcgagatgttgatggtagtcgaatcattgtggagtttgccaaggggggaccacgaggcccaggaggttcacgtgactttgggggcagaggaccacccccaggatcagggagatgtttcaattgtggaattgatggccactgggcccgggattgcaaagcgggtgactggaaaaacaagtgttaccgctgtggagagcgtggtcatatagaaagaaactgccaaaacagtcccaagaaactaaaacgtggtcggagttattcgcgttcaccatcaccccgccgacgttcagcatctcctcgccgtggcagaagccgaagtcgcagtttcagcaggagccgtagctacagtcaatctagatcaccaccaaggagagaccgggctgtcgagcgtgtggacaggtcaaggagccctcgtgcaagcaggagccccaaacgacagaagggttctcctgtgtcaaccagggtggccagaaagcgcaccccatcacctgatgataggtctccgcgaggcagagacagcccctctcctagggatgagaggcgtgctaatggttctgattatggtgggagccctaggcctaggaccagaagccctgggccaaggagcaggagcaggagcaggagcagaagccccatggatgaagctgaaagagaaagcccccggaatggaaatgctcgaagtccgtttgaggagaacggacgagatcgcagtgcaagccctgtggctaggaatgacaggagtggaagggatgatgatgatgacgactatcagatttctcccagaggcagtgaataa

SEQ ID NO: 214 - protein, 332 aa, Mesembryanthemum crystallinum
MPRYSDRHSSSSTRLYVGRLSSRTRTHDLEDLFSRYGRVRDVDMKRDYAFVEYSDPRDADDARYSLNGRDVDGSRIIVEFAKGGPRGPGGSRDFGGRGPPPGSGRCFNCGIDGHWARDCKAGDWKNKCYRCGERGHIERNCQNSPKKLKRGRSYSRSPSPRRRSASPRRGRSRSRSFSRSRSYSQSRSPPRRDRAVERVDRSRSPRASRSPKRQKGSPVSTRVARKRTPSPDDRSPRGRDSPSPRDERRANGSDYGGSPRPRTRSPGPRSRSRSRSRSPMDEAERESPRNGNARSPFEENGRDRSASPVARNDRSGRDDDDDDYQISPRGSE

SEQ ID NO: 215 - DNA, 999 bp, Triticum aestivum
atgcctcgttatgatgatcgttatggaaacgcacgcctgtatgttggtagattgtcctcccgtactcgttcgcgcgacctagaatatcttttcagcaaatatggaagaatacgggaagtggaattgaagcgcgactatgcattcattgaatacagtgatcctcgtgatgctgatgatgcccgatacaatctagatggcagggatgttgatgggagccgcattattgttgagtttgctaaaggggttccacgtggttctggtggttcacgagaacgtgaatatgtgggaagaggccctcctccaggaacaggccgttgtttcaactgtggtattgatggtcactgggccagggactgcaaggctggtgactggaagaacaaatgctaccgctgtggagaaaggggccatatagaaagaaattgccagaatagtccgaggagtctcaggcgtgagagaagctattcacggtccccatctccacgtcgtggacgggcccgcagtcggagctacagcagaagccgtagttacagccgatctaggtccagatcttattctgaatctcccagagggcgccgcacagagcgtgatgagaggagatcaaggagcatcagctacagcaggagccccaggcgatcactctccccagaagctaaggaaatggatcgcagccccacacctgatcgcagtcggagccccaggcgatccatctcacctgtagcaaaggataatggtgatagccctcggggcagggataagagcaggagcccttctgatggctaccgcagccctgtggccaatgggcgcagtccaagccctgctaacaatggcaatcccagtcctaccagggacaacaggggcagtccaagcccgaggggcaacaatggtagccctagtcccaagggcaatggcgatggtggcagcccaagtccaaggggcaatggtgacgatgatggccgtcgcggctcaggctcacctagaggaagaagcgtgactccctga

SEQ ID NO: 216 - protein, 332 aa, Triticum aestivum
MPRYDDRYGNARLYVGRLSSRTRSRDLEYLFSKYGRIREVELKRDYAFIEYSDPRDADDARYNLDGRDVDGSRIIVEFAKGVPRGSGGSREREYVGRGPPPGTGRCFNCGIDGHWARDCKAGDWKNKCYRCGERGHIERNCQNSPRSLRRERSYSRSPSPRRGRARSRSYSRSRSYSRSRSRSYSESPRGRRTERDERRSRSISYSRSPRRSLSPEAKEMDRSPTPDRSRSPRRSISPVAKDNGDSPRGRDKSRSPSDGYRSPVANGRSPSPANNGNPSPTRDNRGSPSPRGNNGSPSPKGNGDGGSPSPRGNGDDDGRRGSGSPRGRSVTP

SEQ ID NO: 217 - DNA, 999 bp, Triticum monococcum
atgcctcgctacgatgagcgtgatcgttacggcggcaacacaaggctgtacgtgggtcgtcttccctcgcgcacccgcacaagggaccttgaagacctcttcggcagatatgggagagtgcgacatgtggatatgaagcacgagtttgcatttgttgagtttagtgatcccagggatgctgatgaagcaaggtacaatcttgatggtcgtgactttgatggaagccgcatgattgttgagtttgctaaaggggttccgcgtggccaaggaggaggaggtgaccgtgaccgtggccgtggcggtgaccgtgaatatatgggtcggggacctcctcctggttctggccgttgctttaactgtgggattgatgggcattgggctcgtgactgcaaagctggcgactggaaaaataggtgctatcgttgtggagatagtggccacatagaaagggattgccagaacagccctaagaacctcaagcgtggaaagagttactccagatctccatctcctcgccgtggaagggtgcgtgataggagctacagcaggagccgcagtaggagctacagccgctctgtttccccaaggagggatgaaaggcgctcaaggagcccccgtgacagtcgcagccccaggaggagcccccgcgacagtcgcagccccaggaggagcccccgcgacagtcgcagccctatgaagagcccccgtggcagtcgcagccctatgaggagcccccgtgacagccgcagccctaggaggagcgcttcacctgccaaggggagggcccggagccccacccctcctggcagcaggagccctgcaccaagggaaaacagcaggagccctgcaccaagggaaaacagcaggagcccaatgaaggcagacagccctaataacatgagcccagctgcaaatggtcgtagcccgagccccagggacggccaagacaatggcaaccaccgcgcacccagtggaagtgcatcacccggtggtggttga

SEQ ID NO: 218 - protein, 332 aa, Triticum monococcum
MPRYDERDRYGGNTRLYVGRLPSRTRTRDLEDLFGRYGRVRHVDMKHEFAFVEFSDPRDADEARYNLDGRDFDGSRMIVEFAKGVPRGQGGGGDRDRGRGGDREYMGRGPPPGSGRCFNCGIDGHWARDCKAGDWKNRCYRCGDSGHIERDCQNSPKNLKRGKSYSRSPSPRRGRVRDRSYSRSRSRSYSRSVSPRRDERRSRSPRDSRSPRRSPRDSRSPRRSPRDSRSPMKSPRGSRSPMRSPRDSRSPRRSASPAKGRARSPTPPGSRSPAPRENSRSPAPRENSRSPMKADSPNNMSPAANGRSPSPRDGQDNGNHRAPSGSASPGGG

SEQ ID NO: 219 - DNA, 1002 bp, Citrus clementina
atgcctcgttatgatgaccggtacggtggtacgcgtctctatgttggacgcttggcttcacggacaagatcacgtgatcttgaggagatcttcagcagatatgggagaattcgcgatgtggatatgaagcgtgacttcgcctttgttgaatttagcgaccctcgtgatgctgacgatgcaagatatagcttaaatggtcgggatgttgatggaagccgtatcattgtggaatttgcaagaggggggccacgtggtcctggtggatctcgtgagtatcttggtcgaggccctcctcctggatctgggcgctgcttcaattgtgggattgatggccattgggctcgagactgcaaggctggagactggaagaataagtgttatcgctgtggtgaacgaggccacatagaacgaaattgtcaaaacagtccaaagaagttaaggaggcctcggagttattcacgttctccaagtcctcgtcgtggtagaagcaggagccgtagttacagtagaggccgcagcgacagccgatcacgatcgcctgtcaagagagataggagtgttgaacgttttgagagaagaacaaggagcccccgagacagtaggagccctaagcgtcgcagaaattcaccaccatcatctaaaggtaggaagcgtagtccaaccccagatgaaagaagtccacaagatcaacgtagcccatccccaagggaccggaggcaggctaatggatcagagtacagtggcagtccaaggggaaagagcagaagccctgtagacgatgccgatggccctgaggataggaattacaggagccctcccgaagaaatggccgcagccgaagccgcagccgcagccttagtccagtccctagggatgataggagcccaattgatgatgatgataatcatggggaccctaaaggcagcgaatcaaattaagtggcgggttaggtttcatgttgggatcgactccctccgaaagttgtttggaacaaatttataa

SEQ ID NO: 220 - protein, 333 aa, Citrus clementina
MPRYDDRYGGTRLYVGRLASRTRSRDLEEIFSRYGRIRDVDMKRDFAFVEFSDPRDADDARYSLNGRDVDGSRIIVEFARGGPRGPGGSREYLGRGPPPGSGRCFNCGIDGHWARDCKAGDWKNKCYRCGERGHIERNCQNSPKKLRRPRSYSRSPSPRRGRSRSRSYSRGRSDSRSRSPVKRDRSVERFERRTRSPRDSRSPKRRRNSPPSSKGRKRSPTPDERSPQDQRSPSPRDRRQANGSEYSGSPRGKSRSPVDDADGPEDRNYRSPPEEMAAAEAAAAALVQSLGMIGAQLMMMIIMGTLKAANQIKWRVRFHVGIDSLRKLFGTNL

SEQ ID NO: 221 - DNA, 1002 bp, Hordeum vulgare
atgcctcgttacgatgatcgttatggaaacgcacgcttgtatgttggtagattgtcctcccgtactcgttcgcgcgacctagaatatcttttcagcaaatatggaagaatacgggaagtggaattgaagcgcgactatgcattcattgaattcagtgattctcgtgatgctgatgaagcccggtacaatctagatggcagggatgttgatgggagccgcattattgttgagtttgctaaaggggttccacgtggttctggtggttcacgagagcgtgaatatgtggggagagggcctcctccaggaacaggccgttgtttcaactgtggtatagatgggcattgggccagggattgcaaggctggtgactggaagaacaaatgctaccgctgtggagaaagaggccatatagagagaaattgccagaatagcccgaggagtctcaggcgtgagagaagctattcacggtccccatctccacgtcgtggacgggcccgcagtcggagctacagcagaagccgtagttacagccgatctaggtccagatcttactcagagtctccgagagggcgtcgcacagagcgtgatgagaggagatcgaggagcattagctacagcaggagccccaggcgatcactctccccagaagctaaggaaatggaccgtagccccacacctgatcgcagtcggagccccaggcgatccatctcccctgtagcaaaggataatggtgacagccctcggggcaggaggacaagcaggagcccttctgatggctaccgtagccctgtggccaatgggcgcagccctagaagccctgctaacaatggcagtcccagtcctgccagggacaacaagggcagtccaagcccgaggggcaacaacggtagccctagtcctaagggcaatggtaatggtggcagcccaagtccaagaggcaatggtgacggtgatggccttcgcggctctggctcacccagaggaagaagcgcgtctccctga

SEQ ID NO: 222 - protein, 333 aa, Hordeum vulgare
MPRYDDRYGNARLYVGRLSSRTRSRDLEYLFSKYGRIREVELKRDYAFIEFSDSRDADEARYNLDGRDVDGSRIIVEFAKGVPRGSGGSREREYVGRGPPPGTGRCFNCGIDGHWARDCKAGDWKNKCYRCGERGHIERNCQNSPRSLRRERSYSRSPSPRRGRARSRSYSRSRSYSRSRSRSYSESPRGRRTERDERRSRSISYSRSPRRSLSPEAKEMDRSPTPDRSRSPRRSISPVAKDNGDSPRGRRTSRSPSDGYRSPVANGRSPRSPANNGSPSPARDNKGSPSPRGNNGSPSPKGNGNGGSPSPRGNGDGDGLRGSGSPRGRSASP

SEQ ID NO: 223 - DNA, 1002 bp, Triticum aestivum
atgcctcgttatgatgatcgttatggaaatgcacgcttgtatgttggtagattgtcctcccgtactcgttcgcgtgacctagaatatcttttcagcaaatatggaagaatacgggaagtggaattgaagcgcgactatgcattcattgaatacagtgatcctcgtgatgctgatgaggcccgatacaacctagatggcagggatgttgatgggagccgcattattgttgagtttgctaaaggggttccacgtggttctggtggttcacgagaacgtgaatatgtgggaagagggcctcctccaggaacaggccgttgtttcaactgtggtattgatggtcattgggccagggactgcaaagctggtgactggaagaacaaatgctaccgctgtggagaaaggggccatattgaaagaaattgccagaatagcccgaggagtctcaggcgtgagagaagctattcacggtccccatctccacgtcgtggacgggctcgcagtcggagctacagcagaagccgtagttacagccgatctaggtccagatcctattctgaatctcccagagggcgccgcacagagcgtgatgagaggagatcaaggagcattagctacagcaggagccccaggcgatcactctccccaggaggcaaggaaatggatcgcagccccacacctgatcgcagtcggagccccaggcgatccatctcacctgtagcaaaggataatggtgatagccctcggggcagggagacaagcaggagcccatctgatggctaccgtagccctgtggccaatgggcgcagcccaagaagccctgttaacaatggcagtcccagtcctaccagagacaacagggccagtccaagcctgaggggcaacaacggtagccctagtcctaagggcaatggcaacggtggcagcccaagtccaaggggcaatggtgacgacgatggacgtcgaggctcaggctcacctagaggaagaagcgtgtctccatga

SEQ ID NO: 224 - protein, 333 aa, Triticum aestivum
MPRYDDRYGNARLYVGRLSSRTRSRDLEYLFSKYGRIREVELKRDYAFIEYSDPRDADEARYNLDGRDVDGSRIIVEFAKGVPRGSGGSREREYVGRGPPPGTGRCFNCGIDGHWARDCKAGDWKNKCYRCGERGHIERNCQNSPRSLRRERSYSRSPSPRRGRARSRSYSRSRSYSRSRSRSYSESPRGRRTERDERRSRSISYSRSPRRSLSPGGKEMDRSPTPDRSRSPRRSISPVAKDNGDSPRGRETSRSPSDGYRSPVANGRSPRSPVNNGSPSPTRDNRASPSLRGNNGSPSPKGNGNGGSPSPRGNGDDDGRRGSGSPRGRSVSP

SEQ ID NO: 225 - DNA, 1002 bp, Zea mays
atgcctcgctatgatgatcgctatggaggcacgcgcttgtatgttggcagattggccccccgtactcgttctcgtgatttagaatatctcttcggcaaatatggaagaatacgagaagtggagttgaagcgcgactatgcatttattgagttcagtgaacatcgtgatgccgatgaagctcggtaccaactagatggcagggatgtcgatggaagtcgcattgttgttgagtttgctaaaggggtcccacgtggtccaggtggctcacgtgaatatatgggaagaggccctccaccaggcacaggtcgttgtttcaactgtggaatggatggtcactgggcaagagactgtaaggctggtgactggaaaaataaatgctaccgttgtggagaaagagggcatatagaaagaaattgccagaacagtcctaggagcgtcaggcgtgaaagaagttactcacgctccccatctccacgccgtggaagaggtcgcagtccaagctatagcaggagcaggagtcgtagccggagccggagctatagccgatcgaggtccctatctggatctcctaggggaggccgccgtgaccgtgatgataggagatcgaggagtcttagctacagcaggagccccgtgcggtcgccccctgcaaaggaaaaggagcgcagtcccacacctggcggaagcaggagcccaaggagccgcagcccacaggatcaggtgatgagcccaccacctaaggataacggcgacaggaatggttcagaccgtggcgacagccccagagggagggaaaacagcaggagccgcagccgcagccgcagcccatccggtggtaaccgcagccctgcagctaatgggcgtagcccgagccccagaggtgaccgtaccccgagccccatggctgaccgtagcccgagcccaaagggcaatggtaacaacgatggtggtgatgatgatactggccgtggtggttcccccacaggaagcaagtcaccctga

SEQ ID NO: 226 - protein, 333 aa, Zea mays
MPRYDDRYGGTRLYVGRLAPRTRSRDLEYLFGKYGRIREVELKRDYAFIEFSEHRDADEARYQLDGRDVDGSRIVVEFAKGVPRGPGGSREYMGRGPPPGTGRCFNCGMDGHWARDCKAGDWKNKCYRCGERGHIERNCQNSPRSVRRERSYSRSPSPRRGRGRSPSYSRSRSRSRSRSYSRSRSLSGSPRGGRRDRDDRRSRSLSYSRSPVRSPPAKEKERSPTPGGSRSPRSRSPQDQVMSPPPKDNGDRNGSDRGDSPRGRENSRSRSRSRSPSGGNRSPAANGRSPSPRGDRTPSPMADRSPSPKGNGNNDGGDDDTGRGGSPTGSKSP

SEQ ID NO: 227 - DNA, 1002 bp, Zea mays
atgcctcgctatgatgatcgctatggaggcacgcgcttgtatgttggcagattggccccccgtactcgttctcgtgatttagaatatctcttcggcaaatatggaagaatacgagaagtggagttgaagcgcgactatgcatttattgagttcagtgaacatcgtgatgccgatgaagctcggtaccaactagatggcagggatgtcgatggaagtcgcattgttgttgagtttgctaaaggggtcccacgtggtccaggtggctcacgtgaatatatgggaagaggccctccaccaggcacaggtcgttgtttcaactgtggaatggatggtcactgggcaagagactgtaaggctggtgactggaaaaataaatgctaccgttgtggagaaagagggcatatagaaagaaattgccagaacagtcctaggagcgtcaggcgtgaaagaagttactcacgctccccatctccacgccgtggaagaggtcgcagtccaagctatagcaggagcaggagccggagccggagccggagctatagccgatcgaggtccctatctggatctcctaggggaggccgccgtgaccgtgatgataggagatcgaggagtcttagctacagcaggagccccatgcggtcgccacctgcaaaggaaaaggagcgcagtcccacacctggcggaagcaggagcccaaggagccgcagcccacaggatcaggtgatgagcccaccacctaaggataacggcgacaggaatggttcagaccgtggcgacagccccagagggagggaaaacagcaggagccgcagccgcagccgcagcccatccggtggtaaccgcagccctgcagctaatgggcgtagcccgagccccagaggtgaccgtaccccgagccccatggctgaccgtagcccgagcccaaagggcaatggtaacaacgatggtggtgatgatgatactggccgtggtggttcccccacaggaagcaagtcaccctga

SEQ ID NO: 228 - protein, 333 aa, Zea mays
MPRYDDRYGGTRLYVGRLAPRTRSRDLEYLFGKYGRIREVELKRDYAFIEFSEHRDADEARYQLDGRDVDGSRIVVEFAKGVPRGPGGSREYMGRGPPPGTGRCFNCGMDGHWARDCKAGDWKNKCYRCGERGHIERNCQNSPRSVRRERSYSRSPSPRRGRGRSPSYSRSRSRSRSRSYSRSRSLSGSPRGGRRDRDDRRSRSLSYSRSPMRSPPAKEKERSPTPGGSRSPRSRSPQDQVMSPPPKDNGDRNGSDRGDSPRGRENSRSRSRSRSPSGGNRSPAANGRSPSPRGDRTPSPMADRSPSPKGNGNNDGGDDDTGRGGSPTGSKSP

SEQ ID NO: 229 - DNA, 1008 bp, Oryza sativa
atgcctcgctatgatgatcattatggaagcacacgcttgtatgttggtagactgtcttcgcgcactcgttctcgtgacctagaatatcttttcggcagatatggaagaatacgtgaagtggagttgaagcgcgactacgcgtttattgaattcagtgatccccgtgatgctgatgaagcgcggtataacctagatggcagggatgttgatggaagccgcattcttgttgagtttgctaaaggagtaagcagttctttggttccacgtggtgctgctggtggttcacgtgaatatatggggagaggacctcctccaggaacaggtcgctgttttaactgtgggattgatggtcactgggcaagagactgcaaggctggtgactggaagaacaaatgttaccgttgtggagaaagaggtcacatagaaagaaactgccaaaacagtccaagaaatctcaggcgagagagaagttattcgcgctccccatcgccacgccgtggacgtggtcatggtcgtagtcgtagctatagccggagccggagcaggagttacagccgatctaggtccagatccctatctggatctcccaggggacgcagagatcgtgatgataggagatcaaggagtcttagctacagcagaagtcccaggcgatccatctccccagcagcaaatggaaaggagcgcaaccccagcccgaatggtaggcggagtccaaggagtccacaggatcgggtaagcccaccacccaaggataatgatgagcgcaatggtgacagcccctggggcagggagaacagcaggagcccatctgacggctaccgtagccctgtggctgccaatgggcgcagcccaagcccaaggaacaatggaagccctagtccaatggacaacaatagccgaagcccaagggacaacggcagcccgagccctagggatggaaatggtgatggtggtagccgtggcggctcacgctcgcccagagcaagcgagtcccctgaagcttga

SEQ ID NO: 230 - protein, 335 aa, Oryza sativa
MPRYDDHYGSTRLYVGRLSSRTRSRDLEYLFGRYGRIREVELKRDYAFIEFSDPRDADEARYNLDGRDVDGSRILVEFAKGVSSSLVPRGAAGGSREYMGRGPPPGTGRCFNCGIDGHWARDCKAGDWKNKCYRCGERGHIERNCQNSPRNLRRERSYSRSPSPRRGRGHGRSRSYSRSRSRSYSRSRSRSLSGSPRGRRDRDDRRSRSLSYSRSPRRSISPAANGKERNPSPNGRRSPRSPQDRVSPPPKDNDERNGDSPWGRENSRSPSDGYRSPVAANGRSPSPRNNGSPSPMDNNSRSPRDNGSPSPRDGNGDGGSRGGSRSPRASESPEA

SEQ ID NO: 231 - DNA, 1017 bp, Oryza sativa
atgtctcggtatgttgaccctaatgaccgttacgaaccacgtggtcgtaacagcaggttgtatgtgggccatatttctctacgtacaagggcagaggatcttgagaacctgttcagcagatatgggagggtgcgatttgtggatctgaagaatgaatatggctttgttgagtttagtgatccccgggatgcaaatgatgcgaggcttgatcttgatggccgaaagtatgatgggagtgacatcattgttcagtttgcaagaggggtcgaacgtggtcttggaggttctcgtggatataaagccagacccgcacatggttctgaccactgcttcaactgtgggatggaggggcactggcaccgtaactgcactgctggtgactggacaaataggtgctatggctgtggagagaggggtcatatattaagggaatgcaagaacagccccaaggatctcaagcaagagagaggctactcaaggtcccgttcacctcgtcgcagaaggagcccaagctatggcaagagtggacccccttctcattggggtagccatggtgctgatcgtgaggaaaggcttcattcaagaagggatggccgcggttacagccgcagccctcggcgccatgattcgccttccaatcagagaaaccacagccctaggcgctatgctttaccctccaatgagagatatgatggcactaggcgctacgcctcgccttcttatgggagagaccgcagtcccgggggcaatgctttgccagccaatgggagaagccacaacctcacatcagatggcatgaacccttcaccaagggagagagatgatcagaatgggagccacaggagaggtgacaacgattacctgcccagtaagagagatgatcagaatgggagctacaggagaggtgacagcgattacctctccagggagagagatgattacctgtccagggggagagatgatcagaatgggagccacaggagaggtgacagcgattacctgtcccgcgaccgttga

SEQ ID NO: 232 - protein, 338 aa, Oryza sativa
MSRYVDPNDRYEPRGRNSRLYVGHISLRTRAEDLENLFSRYGRVRFVDLKNEYGFVEFSDPRDANDARLDLDGRKYDGSDIIVQFARGVERGLGGSRGYKARPAHGSDHCFNCGMEGHWHRNCTAGDWTNRCYGCGERGHILRECKNSPKDLKQERGYSRSRSPRRRRSPSYGKSGPPSHWGSHGADREERLHSRRDGRGYSRSPRRHDSPSNQRNHSPRRYALPSNERYDGTRRYASPSYGRDRSPGGNALPANGRSHNLTSDGMNPSPRERDDQNGSHRRGDNDYLPSKRDDQNGSYRRGDSDYLSRERDDYLSRGRDDQNGSHRRGDSDYLSRDR

SEQ ID NO: 233 - DNA, 1026 bp, Sorghum bicolor
atgcctcgctatgatgaccgctatggaggcacgcgcttgtatgttggcagattggccccccgtactcgttcccgcgatttagaatatctgttcggcagatatgggagaatacgagaagtggagttgaagcgcgactatgcatttattgagttcagtgatcatcgtgatgctgatgaggctcgataccaactagatggcagggatgttgatgggagtcgcattgttgttgagtttgctaaaggggtcccacgtggtccaggtggctcacgtgaatatatgggaagaggccctccaccaggtaccggtcgttgtttcaactgtggaattgatggtcactgggcaagagactgtaaggctggtgactggaaaaacaaatgctaccgttgtggagaaagagggcatatagaaagaaattgccagaacagtcctaggagtgtcaggcgtgaaagaagttactcacggtccccatctccacgtcgtggaaggggtcgcagtccaagctatagtagaagcaggagcaggagccggagtcggagctatagccgatcgagatccctatctggatctcctaggggaggtcgccgtgaccgtgacgataggagatcaaggagtcttagctacagcaggagccccatgcgatctgcctcgccacctccaaaggaaaaggagcgcagccccacacctgatggaagcaggagcccaaggagtcgcagcccccaggatcaggtgatgagcccaccaccaaaggataacggcgaaggcaatggttcagaccgtggcgagagccccagaggaagggaaactagcaggagcaggagccgcagcaggagcccatccggtgataaccgcagccctgcagctaatgggcggagcccgagtcctagaggtgaccgtagcccaagccccagggctgaccgtagcccaagccccaaggctgaccgtagcccaagccccaagggcaatggtaacaatgacgatgatgatgctgcccgtggtgcttccccagcaggaagcaagtcaccctga

SEQ ID NO: 234 - protein, 341 aa, Sorghum bicolor
MPRYDDRYGGTRLYVGRLAPRTRSRDLEYLFGRYGRIREVELKRDYAFIEFSDHRDADEARYQLDGRDVDGSRIVVEFAKGVPRGPGGSREYMGRGPPPGTGRCFNCGIDGHWARDCKAGDWKNKCYRCGERGHIERNCQNSPRSVRRERSYSRSPSPRRGRGRSPSYSRSRSRSRSRSYSRSRSLSGSPRGGRRDRDDRRSRSLSYSRSPMRSASPPPKEKERSPTPDGSRSPRSRSPQDQVMSPPPKDNGEGNGSDRGESPRGRETSRSRSRSRSPSGDNRSPAANGRSPSPRGDRSPSPRADRSPSPKADRSPSPKGNGNNDDDDAARGASPAGSKSP

SEQ ID NO: 235 - DNA, 1062 bp, Zea mays
atgcctcgctatgatgaccgctatggaggcacgcgcttgtatgttggcagattggccactcgtactcgttcccgcgatttagaacatctgtttggcagatatggaagaatacgagaagtggagttgaagcgtgactatgcatttattgagttcagtgatcatcgcgatgctgatgaggctcgataccagctagatggcagggatgttgatgggagtcgtattgttgttgagtttgctaaaggggtcccacgtggttcaggtggctcacgtgaatatatggggagaggccctccaccaggtacaggtcgttgtttcaactgtggagttgatggtcactgggcaagagactgtaaagctggtgactggaaaaacaaatgctaccgttgtggagaaaggggccatatagaaagaaattgccagaacagtcctaggagtctcaggcgagagagaagttactcacggtccccatctccccgccgtggacggggccgcagtcgaagctatggcaggagcaggagccggagtcggagctatagtcgatcaagatccctgtctagatctcctaggggaggtcgtcgtgaccgtgacgataggagatcaaggagtcctagctatagcaggagccccatgcgatctgcctcgccaccagtaaaggaaaaggagcgcagccccgcacctgatggaagcagtagcccaaggagtcgcagcccccaggatcaggtgatgagcccaccaccaaaggataatggcgaaggcaatggctcagaccgtggcggcagccccagagggagggagaacagcaggagctgcagccgcagccgcagtccatctggtagtaaccgcagccctgcggccaatggacgtagccggagtcctggaggtgagcggagcccgagtcctggaggtgagcggagcccgagtcctagaggtgagcggagcccgagtcctagggctgaccgtagcccaagccccaatggcaatggtaacaatgatgctgctgctgatgtcgatgctgatgctgctgcccgcagtggctcccccactggaagcaagtcaccctga

SEQ ID NO: 236 - protein, 353 aa, Zea mays
MPRYDDRYGGTRLYVGRLATRTRSRDLEHLFGRYGRIREVELKRDYAFIEFSDHRDADEARYQLDGRDVDGSRIVVEFAKGVPRGSGGSREYMGRGPPPGTGRCFNCGVDGHWARDCKAGDWKNKCYRCGERGHIERNCQNSPRSLRRERSYSRSPSPRRGRGRSRSYGRSRSRSRSYSRSRSLSRSPRGGRRDRDDRRSRSPSYSRSPMRSASPPVKEKERSPAPDGSSSPRSRSPQDQVMSPPPKDNGEGNGSDRGGSPRGRENSRSCSRSRSPSGSNRSPAANGRSRSPGGERSPSPGGERSPSPRGERSPSPRADRSPSPNGNGNNDAAADVDADAAARSGSPTGSKSP

SEQ ID NO: 237 - DNA, 1062 bp, Zea mays
atgcctcgctatgatgaccgctatggaggcacgcgcttgtatgttggcagattggccactcgtactcgttcccgcgatttagaacatctgtttggcagatatggaagaatacgagaagtggagttgaagcgtgactatgcatttattgagttcagtgatcatcgcgatgctgatgaggctcgataccagctagatggcagggatgttgatgggagtcgtattgttgttgagtttgctaaaggggtcccacgtggttcaggtggctcacgtgaatatatggggagaggccctccaccaggtacaggtcgttgtttcaactgtggagttgatggtcactgggcaagagactgtaaagctggtgactggaaaaacaaatgctaccgttgtggagaaaggggccatatagaaagaaattgccagaacagtcctaggagtctcaggcgagagagaagttactcacggtccccatctccccgccgtggacggggccgcagtcgaagctatagcaggagcaggagccggagtcggagctatagtcgatcaagatccctgtctagatctcctaggggaggtcgtcgtgaccgtgacgataggagatcaaggagtcctagctatagcaggagccccatgcgatctgcctcgccaccagtaaaggaaaaggagcgcagccccgcacctgatggaagcaggagcccaaggagtcgcagcccccaggatcaggtgatgagcccaccaccaaaggataatggcgaaggcaatggctcagaccgtggcggcagccccagagggagggagaacagcaggagctgcagccgcagccgcagtccatctggtagtaaccgcagccctgcggccaatggacgtagccggagtcctggaggtgagcggagcccgagtcctggaggtgagcggagcccgagtcctagaggtgagcggagcccgagtcctagggctgaccgtagcccaagccccaatggcaatggtaacaatgatgctgctgctgatgtcgatgctgatgctgctgcccgcagtggctcccccactggaagcaagtcaccctga

SEQ ID NO: 238 - protein, 353 aa, Zea mays
MPRYDDRYGGTRLYVGRLATRTRSRDLEHLFGRYGRIREVELKRDYAFIEFSDHRDADEARYQLDGRDVDGSRIVVEFAKGVPRGSGGSREYMGRGPPPGTGRCFNCGVDGHWARDCKAGDWKNKCYRCGERGHIERNCQNSPRSLRRERSYSRSPSPRRGRGRSRSYSRSRSRSRSYSRSRSLSRSPRGGRRDRDDRRSRSPSYSRSPMRSASPPVKEKERSPAPDGSRSPRSRSPQDQVMSPPPKDNGEGNGSDRGGSPRGRENSRSCSRSRSPSGSNRSPAANGRSRSPGGERSPSPGGERSPSPRGERSPSPRADRSPSPNGNGNNDAAADVDADAAARSGSPTGSKSP

SEQ ID NO: 239 - DNA, 1101 bp, Saccharum officinarum
atgcctcgctatgatgaccgctatggaggcacgcgcttgtatgttggcagattggcccctcgtactcgttcccgcgatttagaaaatctgttcggcagatatggaagaatacgagaagtggagttgaagcgcgactatgcatttattgagttcagtgatcatcgtgatgctgatgaggctcgataccaactagatggcagggatgttgatgggagtcgcattgttgttgagtttgccaaaggggtcccacgtggtccaggtggctcacgtgaatatatgggaagaggccctccaccaggtacaggtcgttgtttcaactgtggaattgatggtcactgggcaagagactgtaaggctggtgactggaaaaacaaatgctaccgttgtggagaaagagggcatatagaaagaaattgccagaacagtcctaggagtgtcaggcgtgaaagaagttactcacggtccccaactccacgccgtggaaggggtcgcagtccaagctatagcagaagcaggagcaggagctatagccgatcgagatccctgtctggatctcctaggggaggtcgccgtgaccgtgacgataggagatcaaggagccttagctacagcaggagtcccatgcgatctgcctcgccacctccaaaggaaagggagcgcagccccacacctgatggaagcaggagcccaaggagtcgcagcccccaggatcaggtgatgagcccaccaccaaaggataatgacgaaggtaatggttcagaccgtggcgacagccccagagggagggaaaacagcatgagcaggagccgcagccgcagccgcagccggagcccatccggtggtaaccgcagccctgcagctaatgggcgtagcccgagtcctaaagtgaccggtatccaagccccagggcttaccgtagcccaagccccaagggccgtggtaacaacaaccatgctgatgcttcccccggttgttcccttgcaggaagccaggtcacctttaagtttgaacgctgccccttcccatttgtggggctttttgatgcaaggggcaaactttttatgcataactattttttcttccccttttttaaagaactga

SEQ ID NO: 240 - protein, 366 aa, Saccharum officinarum
MPRYDDRYGGTRLYVGRLAPRTRSRDLENLFGRYGRIREVELKRDYAFIEFSDHRDADEARYQLDGRDVDGSRIVVEFAKGVPRGPGGSREYMGRGPPPGTGRCFNCGIDGHWARDCKAGDWKNKCYRCGERGHIERNCQNSPRSVRRERSYSRSPTPRRGRGRSPSYSRSRSRSYSRSRSLSGSPRGGRRDRDDRRSRSLSYSRSPMRSASPPPKERERSPTPDGSRSPRSRSPQDQVMSPPPKDNDEGNGSDRGDSPRGRENSMSRSRSRSRSRSPSGGNRSPAANGRSPSPKVTGIQAPGLTVAQAPRAVVTTTMLMLPPVVPLQEARSPLSLNAAPSHLWGFLMQGANFLCITIFSSPFLKN

SEQ ID NO: 241 - protein, 50 aa, Artificial sequence
  motif 1
  VARIANT (5)..(5): / replace = "Thr"
  VARIANT (13)..(13): / replace = "Leu"
  VARIANT (44)..(44): / replace = "Lys"
  VARIANT (48)..(48): / replace = "Arg"
  VARIANT (49)..(49): / replace = "Asn"
PPPGSGRCFNCGIDGHWARDCKAGDWKNKCYRCGERGHIERNCQNSPKKL

SEQ ID NO: 242 - protein, 50 aa, Artificial sequence
  motif 2
  VARIANT (1)..(1): / replace = "Leu"
  VARIANT (3)..(3): / replace = "Gly"
  VARIANT (4)..(4): / replace = "Lys"
  VARIANT (8)..(8): / replace = "Ile"
  VARIANT (10)..(10): / replace = "Glu"
  VARIANT (12)..(12): / replace = "Glu"
  VARIANT (13)..(13): / replace = "Leu"
  VARIANT (15)..(15): / replace = "His"
  VARIANT (17)..(17): / replace = "Phe"
  VARIANT (20)..(20): / replace = "Ile"
  VARIANT (29)..(29): / replace = "Glu"
  VARIANT (30)..(30): / replace = "Glu"
  VARIANT (34)..(34): / replace = "Ser"
  VARIANT (36)..(36): / replace = "Phe"
  VARIANT (40)..(40): / replace = "Phe"
  VARIANT (46)..(46): / replace = "Leu" / replace = "Val"
HFSRYGRVRDVDMKRDYAFVEFSDPRDADDARYNLDGRDVDGSRIIVEFA

SEQ ID NO: 243 - protein, 21 aa, Artificial sequence
  motif 3
  VARIANT (3)..(3): / replace = "Gly" / replace = "Ser"
  VARIANT (10)..(10): / replace = "His"
  VARIANT (12)..(12): / replace = "Ala"
  VARIANT (17)..(17): / replace = "Thr"
YGNTRLYVGRLSSRTRSRDLE

SEQ ID NO: 244 - protein, 7 aa, Artificial sequence
  motif 4
RLYVGRL

SEQ ID NO: 245 - protein, 7 aa, Artificial sequence
  motif 5
RDYAFIE

SEQ ID NO: 246 - protein, 6 aa, Artificial sequence
  motif 6
RSYSRS

SEQ ID NO: 247 - DNA, 2194 bp, Oryza sativa
aatccgaaaagtttctgcaccgttttcaccccctaactaacaatatagggaacgtgtgctaaatataaaatgagaccttatatatgtagcgctgataactagaactatgcaagaaaaactcatccacctactttagtggcaatcgggctaaataaaaaagagtcgctacactagtttcgttttccttagtaattaagtgggaaaatgaaatcattattgcttagaatatacgttcacatctctgtcatgaagttaaattattcgaggtagccataattgtcatcaaactcttcttgaataaaaaaatctttctagctgaactcaatgggtaaagagagagattttttttaaaaaaatagaatgaagatattctgaacgtattggcaaagatttaaacatataattatataattttatagtttgtgcattcgtcatatcgcacatcattaaggacatgtcttactccatcccaatttttatttagtaattaaagacaattgacttatttttattatttatcttttttcgattagatgcaaggtacttacgcacacactttgtgctcatgtgcatgtgtgagtgcacctcctcaatacacgttcaactagcaacacatctctaatatcactcgcctatttaatacatttaggtagcaatatctgaattcaagcactccaccatcaccagaccacttttaataatatctaaaatacaaaaaataattttacagaatagcatgaaaagtatgaaacgaactatttaggtttttcacatacaaaaaaaaaaagaattttgctcgtgcgcgagcgccaatctcccatattgggcacacaggcaacaacagagtggctgcccacagaacaacccacaaaaaacgatgatctaacggaggacagcaagtccgcaacaaccttttaacagcaggctttgcggccaggagagaggaggagaggcaaagaaaaccaagcatcctccttctcccatctataaattcctccccccttttcccctctctatataggaggcatccaagccaagaagagggagagcaccaaggacacgcgactagcagaagccgagcgaccgccttctcgatccatatcttccggtcgagttcttggtcgatctcttccctcctccacctcctcctcacagggtatgtgcctcccttcggttgttcttggatttattgttctaggttgtgtagtacgggcgttgatgttaggaaaggggatctgtatctgtgatgattcctgttcttggatttgggatagaggggttcttgatgttgcatgttatcggttcggtttgattagtagtatggttttcaatcgtctggagagctctatggaaatgaaatggtttagggatcggaatcttgcgattttgtgagtaccttttgtttgaggtaaaatcagagcaccggtgattttgcttggtgtaataaagtacggttgtttggtcctcgattctggtagtgatgcttctcgatttgacgaagctatcctttgtttattccctattgaacaaaaataatccaactttgaagacggtcccgttgatgagattgaatgattgattcttaagcctgtccaaaatttcgcagctggcttgtttagatacagtagtccccatcacgaaattcatggaaacagttataatcctcaggaacaggggattccctgttcttccgatttgctttagtcccagaattttttttcccaaatatcttaaaaagtcactttctggttcagttcaatgaattgattgctacaaataatgcttttatagcgttatcctagctgtagttcagttaataggtaatacccctatagtttagtcaggagaagaacttatccgatttctgatctccatttttaattatatgaaatgaactgtagcataagcagtattcatttggattattttttttattagctctcaccccttcattattctgagctgaaagtctggcatgaactgtcctcaattttgttttcaaattcacatcgattatctatgcattatcctcttgtatctacctgtagaagtttctttttggttattccttgactgcttgattacagaaagaaatttatgaagctgtaatcgggatagttatactgcttgttcttatgattcatttcctttgtgcagttcttggtgtagcttgccactttcaccagcaaagttc

SEQ ID NO: 248 - DNA, 52 bp, Artificial sequence
  primer: prm15077
ggggacaagtttgtacaaaaaagcaggcttaaacaatgccgcgctatgatga

SEQ ID NO: 249 - DNA, 50 bp, Artificial sequence
  primer: prm15078
ggggaccactttgtacaagaaagctgggtactgcgattaaatttcaggct

SEQ ID NO: 250 - DNA, 288 bp, Oryza sativa
atggaatccattaagacacaatctcaaggttctgcctcttctgttccaaagaacccagccatgtcctcttgtcggaagaagaagtctgacgacgctacgttcctcgaagatctgaaagaccatatcgacgagttcatccatgcctccatggatgagcacaagcattgcttcaaaaacaccatccagaagatgtttgggatgtcaaaggttgtcgcagagcgttccgctgaagcaaaagaagctgaagtcgagagcgctttgcctcttcagaccagtgtctcgcagtag

SEQ ID NO: 251 - protein, 95 aa, Oryza sativa
MESIKTQSQGSASSVPKNPAMSSCRKKKSDDATFLEDLKDHIDEFIHASMDEHKHCFKNTIQKMFGMSKVVAERSAEAKEAEVESALPLQTSVSQ

SEQ ID NO: 252 - DNA, 480 bp, Acetabularia acetabulum
atgggggttaataaagcaggcggtatcattggcagctaccaggaaagcgcggagcttgtgagctccgagaagagacttcagccgtacaaggaagtgtttggattggagcgtttccgggagtgcgagttgatccacgggcgttgggccatgcttgcgtgtctggggtgcattgtggctgagggggccacgggcgtcagctgggtggaagctggcaaagttgagctggatggggcacaatatttcaatttcaacctacccttctccatcacacagctcgtatggattgaagctattcttgtcggcggcgctgaaatttacagaaacactgaactagatagcgtaaaaaggtgttaccccggtggaatttttgatcccttgaaattggcatctgatgacagcgagaggtctttcaaactgaaggaagcagaaatcaaacatgcacgacttgcaatgatcgcttttcttggctattccatatag

SEQ ID NO: 253 - protein, 159 aa, Acetabularia acetabulum
MGVNKAGGIIGSYQESAELVSSEKRLQPYKEVFGLERFRECELIHGRWAMLACLGCIVAEGATGVSWVEAGKVELDGAQYFNFNLPFSITQLVWIEAILVGGAEIYRNTELDSVKRCYPGGIFDPLKLASDDSERSFKLKEAEIKHARLAMIAFLGYSI

SEQ ID NO: 254 - DNA, 201 bp, Adiantum capillus-veneris
gaacgataatatgttggtgtgtatgtgatctgtatagaggtactgcaatattttcatcaccttgtgcattagcttcagtaccagcgatgcattaattgctgcgtataggcgcagctggttggggaacgataatatgttggtgtgtatgtgatctgtatagagagaaattaagaggatagaatataattggtgcagctatga

SEQ ID NO: 255 - protein, 66 aa, Adiantum capillus-veneris
MDGIDSFDLIKARSSITKKLKMATTTKGNVWYIRENPSRPSVRKKRERVFLERWVSSACGSGLKNQ

SEQ ID NO: 256 - DNA, 225 bp, Allium cepa
atgcaggaaaaaaagtcaactgatgatggaatttttggtaatatcaagagccactataagcagtttgtgaatagtcctatggatcgacacaggatttgtctgaagaaaactctggatggtgttagcaacaagttcaggaaatctggctctatgattgaattaaagactgaaggtgacatggttgttagagaagagaaccaaaagccagtccaaagttctgagtag

SEQ ID NO: 257 - protein, 74 aa, Allium cepa
MQEKKSTDDGIFGNIKSHYKQFVNSPMDRHRICLKKTLDGVSNKFRKSGSMIELKTEGDMVVREENQKPVQSSE

SEQ ID NO: 258 - DNA, 216 bp, Arachis hypogaea
gttttgtgcttaatttacctgtcttatactgatcctatttgtatattttgggcataagatgatcatatagatatgatgactttaagattggacctaactagagcttctaccatgggctgtaatgagcttgctcaggttttgcattttgtaatcttgtggtgtaaatctaatttctttttctatggcacttaaatgtgcttgtgtttatttatttgt

SEQ ID NO: 259 - protein, 71 aa, Arachis hypogaea
MRSVFGHQLHVLALNSKSRAGVYFLLKCLTELSFIHYDARFLQCLKDNFFQFLHLQSSIRLLSQINKHKHI

SEQ ID NO: 260 - DNA, 270 bp, Arabidopsis lyrata
atggagacccagaaaaatcaagccgaaatccctccgaaaccggccatgacttcatgtaggaagaaggtaaaggatgatgccactttctttgaggacgtcaaagatcacattgatgacttcatacatgcctccatggatgaacacaagacctgtttccagaagaccatcaagaagatgtttggattatcaaaggcggtcgcagagaagcaagctgaggaggcaaagggagtcgagagtcaattgcctcttcagacgacagtgtcagagtaa

SEQ ID NO: 261 - protein, 89 aa, Arabidopsis lyrata
METQKNQAEIPPKPAMTSCRKKVKDDATFFEDVKDHIDDFIHASMDEHKTCFQKTIKKMFGLSKAVAEKQAEEAKGVESQLPLQTTVSE

SEQ ID NO: 262 - DNA, 315 bp, Arabidopsis lyrata
atggcttcccagacaaagcaaaccgtggtggatacacagaaaattgaaaccgagaacccgccaaaaccggaagtgcctttatcatcatgcaggaagagggtgaaggatgataatgccactttctttgaaaacctcaaggatcacatggatgaattcatccatgcctcaatggatgaacacaagacttgtttcaaaaacaccatgaacaagatgttcgggaccttttcgaagtcggatgcagttgcagagaagcaatttgaggctaaggaagtcgtcgagattcactctcctcttcaggcagcagtgactaagtag

SEQ ID NO: 263 - protein, 104 aa, Arabidopsis lyrata
MASQTKQTVVDTQKIETENPPKPEVPLSSCRKRVKDDNATFFENLKDHMDEFIHASMDEHKTCFKNTMNKMFGTFSKSDAVAEKQFEAKEVVEIHSPLQAAVTK

SEQ ID NO: 264 - DNA, 348 bp, Arabidopsis lyrata
atggctggctttcacttataccttgtcctccggttttctctccatgcggaatcgagaatcgtatccttacaatcggcttcactcactaactcacccaaaccagaagtgccttcatcatcatgtaggaagtgggacaaggatgaaagtgccactttctttgaaaagccgaagaagcacctggatgaacacatgacttgtttcaaaaccaccatgaacaagcctaagcaaattcatgagatcaaggacttgcttccgacagcaagaaggagagatgctcgatctgtgacgatgatgagaagcaaatggaactatttaatggaattaagatttgaattgttttggatttga

SEQ ID NO: 265 - protein, 115 aa, Arabidopsis lyrata
MAGFHLYLVLRFSLHAESRIVSLQSASLTNSPKPEVPSSSCRKWDKDESATFFEKPKKHLDEHMTCFKTTMNKPKQIHEIKDLLPTARRRDARSVTMMRSKWNYLMELRFELFWI

SEQ ID NO: 266 - DNA, 387 bp, Alexandrium ostenfeldii
atggcagaggccactgggtctgggaatgagctggatgagcaaactgcctacggatatggcggacaacaaccccaggcatcgagcccgcgggtaagcttggaacgagcaacgatacggccatgccatcaacaatgggagagctcacgccggaaatggcaatcacccccgtctgcgcaaaccacacatgcgccaagcgctgcggttctcactcctgtagagtatgcaaccacgcaggcaaacaagctgtatcatgcatcgctggacgaacacctgaagccacgtgagttgcgtctgatcacggagccacgtaccaatatgccacaaccggagatcccaggacccgtaaccccttgccaacatgggggaagcgaggtacgcatgcggtga

SEQ ID NO: 267 - protein, 128 aa, Alexandrium ostenfeldii
MAEATGSGNELDEQTAYGYGGQQPQASSPRVSLERATIRPCHQQWESSRRKWQSPPSAQTTHAPSAAVLTPVEYATTQANKLYHASLDEHLKPRELRLITEPRTNMPQPEIPGPVTPCQHGGSEVRMR

SEQ ID NO: 268 - DNA, 213 bp, Avena sativa
atgatgatcaggttggtggttatgttgtcggttacaagggtctggtatttgcaacagtcagaggatctggtcatatggttcctacataccaacctcgaagagcactcatcttgttctcctctttcctgcaaggaaagctgccccctgaatgacaagaacattgcaagcttatatttcttctttgtttttagagtcagagagagagaatggtga

SEQ ID NO: 269 - protein, 70 aa, Avena sativa
MMIRLVVMLSVTRVWYLQQSEDLVIWFLHTNLEEHSSCSPLSCKESCPLNDKNIASLYFFFVFRVREREW

SEQ ID NO: 270 - DNA, 225 bp, Agrostis stolonifera
atgccctatattgatcaccgaatcgaaaaggcgcgaatacaaaggaagaaacttaataccctctatctcctaagagactgtgcgcgtaatccatggaatactaataggctaaagactttagagggcatagcacaagggagttgcattttagataccaaattagacagctcgtttttactagatctaaacaatcatattacacaactaacgagctacgtagcatag

SEQ ID NO: 271 - protein, 74 aa, Agrostis stolonifera
MPYIDHRIEKARIQRKKLNTLYLLRDCARNPWNTNRLKTLEGIAQGSCILDTKLDSSFLLDLNNHITQLTSYVA

SEQ ID NO: 272 - DNA, 264 bp, Agrostis stolonifera
ctgcaaccggaagatgccaccagaatgccaatgcctggacatctcgtaccagggttgcaacccagcgtgcacgaactgcgtcaagtacaccgccaccgacgacgaaccgcccgtctaccggtgtgccgactcgctcaccaacttctgcaagcgccgctgcacgccgaccgcggcggcgaccatgcatctgaatgaatgaacccgggcccggcgacttctctgaggataagttctgttcctgctttgctttgagaaaagaaataa

SEQ ID NO: 273 - protein, 87 aa, Agrostis stolonifera
MREKAREYHYYRNFEHVQHFIHGNSRMRSMCHQAATRLLFLFSKQSRNRTYPQRSRRARVHSFRCMVAAAVGVQRRLQKLVSESAHR

SEQ ID NO: 274 - DNA, 315 bp, Arabidopsis thaliana
atggcttcccagacaaatcaaaccgtggtggataccaagaaaatcgaaaccgagaacccgccaaaaccgcaagtgcctgcatcatcatgcaggaagagggtgaaggatgataacgccactttctttgcaaacctcaaggatcacatggatgaattcatacatgcctcaatggatgaacacaagacttgtttcaaaaacaccatggacaagatattcgggagcttctccaaggcggaggcagttgcagagaagcaaattgaggctaaggaagtggtcgagattcactctcctcttcagacagcagtgactaagtag

SEQ ID NO: 275 - protein, 104 aa, Arabidopsis thaliana
MASQTNQTVVDTKKIETENPPKPQVPASSCRKRVKDDNATFFANLKDHMDEFIHASMDEHKTCFKNTMDKIFGSFSKAEAVAEKQIEAKEVVEIHSPLQTAVTK

SEQ ID NO: 276 - DNA, 273 bp, Arabidopsis thaliana
atggagacgcagaaaactcaagctgaaaacccgccaaaaccggccacgtcttcatgtcgaaagaagacaaaggatgatgccaatttcctagaagacgtcaaggatcacatcgatgatttcattaatgcttccatggatgatcacaagaactgtttcaacaaaaccatcaagaagatgtttgggttgtcaaaggctgttgcggataagcagcaaagtgaggctaaaggaggagtcgagagttatttgcctcttcagacaacagtctcagattag

SEQ ID NO: 277 - protein, 90 aa, Arabidopsis thaliana
METQKTQAENPPKPATSSCRKKTKDDANFLEDVKDHIDDFINASMDDHKNCFNKTIKKMFGLSKAVADKQQSEAKGGVESYLPLQTTVSD

SEQ ID NO: 278 - DNA, 261 bp, Arabidopsis thaliana
atggagacccagacaaatcaaagtccgaaaccggccatgacttcatgtaggaagaaggtaaaggatgatgccactttctttgaggacgtgaaagatcacattgatgactttatacatgcctcaatggatgaacacaagtcctgtttccaaaagaccatcaaaaagatgtttggattgtcaaaggcggtcgcagagaagcaagctgtggaggcaaagggagtcgagagtcaattgcctcttcagacgacagtctcggagtaa

SEQ ID NO: 279 - protein, 86 aa, Arabidopsis thaliana
METQTNQSPKPAMTSCRKKVKDDATFFEDVKDHIDDFIHASMDEHKSCFQKTIKKMFGLSKAVAEKQAVEAKGVESQLPLQTTVSE

SEQ ID NO: 280 - DNA, 279 bp, Amborella trichopoda
atgaaaccccaaccccaaatgaatcaatctgaaaccgaacgcccctctgcaactatctcttcgtgtcggaagaagaaatcagatgacagcagctttttggaggacgtgagggaccatatcgatgaattcattcacgcttctatggatgagcacaaaacttgtttcaagaagactattcagaagatgtttggaatgtccaaggtagttgctgagaggaatttagccacccaaaaggaagtcgaaagtgttctgcccctccaatccgttgtgtcagagtag

SEQ ID NO: 281 - protein, 92 aa, Amborella trichopoda
MKPQPQMNQSETERPSATISSCRKKKSDDSSFLEDVRDHIDEFIHASMDEHKTCFKKTIQKMFGMSKVVAERNLATQKEVESVLPLQSVVSE

SEQ ID NO: 282 - DNA, 285 bp, Aquilegia sp.
aggtgggggtgtgatgggggcagatggttgggactcaggttcagtaaactgagctgccattcgtaacacctaatagaagaggaggattagctagattcttatcagagttaagaacatatataagatattatataaattttatagaagttttaccacatgaaattttaagtctgatctttattcatagttagataatgcgacctattcttttcttttctttttttccggtctgtttaaaaacacacacagcaataataattgcatgacatctgactagtccactat

SEQ ID NO: 283 - protein, 94 aa, Aquilegia sp.
MAAQFTEPESQPSAPITPPPVSSCRKKKSDDNASFLEDVKSHIDEFVSASMDEHTTCFKKTIQKMFGMSKVVAERNANAKEVESSLPLQTQVAD

SEQ ID NO: 284 - DNA, 282 bp, Brachypodium distachyon
tgctggagattattatccagcaggccacagtgccggtggttgtcgatgctggcatcggcgttcccagccatgccgcgcaggcgctggaaatgggggccgacgcggtgttagtgaatacggcgattgccgtcgcggacgatcccgtcaacatggcgaaggcatttcgtctggcggtagaagcaggcctactggcacgtcagtccggaccgggcagccgcagttattttgctcatgccaccagcccgctgaccggatttctggaggcatcggcatgaaaacctt

SEQ ID NO: 285 - protein, 93 aa, Brachypodium distachyon
MAGNADASIDNHRHCGLLDNNLQHGAGFQSLIRANRRAERHHRCTADFFQTFTQYRIGPAVRQHDKSLLYQRFGGFQGFDGIGQQPAGVRVNL

SEQ ID NO: 286 - DNA, 366 bp, Brassica napus
atgttaatggaaaaaaagcttgtggttaaggagctggagaaagggaaagagttagcgaatcagctgatgaacaatttcaaaaacccttcctcgtcttctaaggattcaaatgaggttttgatatcggagatcctcaaatgtttcgaaaacacaatagctaggatgatgagtcttgaaaagaaaactcttaagagaagccatgagagaagtaatcagagtaacaagaagagaatgctggaaaaaaaaaagacggagaacgtgaagatttgtgtcggaacaggacaagaaggaactccacttgatgatggtcactgctggagaaaatatggtcagaaagatattcatggatccaagaaccctaggtaa

SEQ ID NO: 287 - protein, 121 aa, Brassica napus
MLMEKKLVVKELEKGKELANQLMNNFKNPSSSSKDSNEVLISEILKCFENTIARMMSLEKKTLKRSHERSNQSNKKRMLEKKKTENVKICVGTGQEGTPLDDGHCWRKYGQKDIHGSKNPR

SEQ ID NO: 288 - DNA, 240 bp, Brassica napus
atggatagccagaaggagaaggagccaaaagctgcagtttctacgacatcttcttcttgcaggaagtatgtcaatgatgacaacgccactttccttgcaaacctcaaagaccacttcaacgagttcctcaatgcctctatggatgaacacaaaacttgcttcaaaaacaccatcgacaagatattcgggaggtcaaaggaggttgagactaaggaagtcgagagtcgccctcctctttag

SEQ ID NO: 289 - protein, 79 aa, Brassica napus
MDSQKEKEPKAAVSTTSSSCRKYVNDDNATFLANLKDHFNEFLNASMDEHKTCFKNTIDKIFGRSKEVETKEVESRPPL

SEQ ID NO: 290 - DNA, 294 bp, Brassica napus
atggagacaccaccaaaagatgaaacacaaaaccctcctgcgaatccgaatccgaaaccagccatggcgtcttcatgtaggaggaaggtaaaggaagatgccactttttttgaggacgtgaaagatcacatcgatgagttcattcatgcctccatggatgaacacaagacctgcttccagaagaccatcagcaagatgtttggattatccaaggctgtggctgagaagcaggccgaggaagccaagggaggagtcgagagtcagttgcctcttcaaacgacagtgtcggattaa

SEQ ID NO: 291 - protein, 97 aa, Brassica napus
METPPKDETQNPPANPNPKPAMASSCRRKVKEDATFFEDVKDHIDEFIHASMDEHKTCFQKTISKMFGLSKAVAEKQAEEAKGGVESQLPLQTTVSD

SEQ ID NO: 292 - DNA, 270 bp, Brassica napus
atggagacaccaccaaaagatgaaacacaaaaccctcctccgagaccagccatggcttcatgtaggaggaaggtaaaggaagatgccactttctttgaggacgtcaaagatcacatcgatgagttcatccatgcctccatggatgaacacaagacctgtttccagaagaccatcagcaagatgtttggattatccaaggctgtggctgagaagcaggccgagggaggagtcgagagtcagttgcctcttcaaacgacagtgtcggattaa

SEQ ID NO: 293 - protein, 89 aa, Brassica napus
METPPKDETQNPPPRPAMASCRRKVKEDATFFEDVKDHIDEFIHASMDEHKTCFQKTISKMFGLSKAVAEKQAEGGVESQLPLQTTVSD

SEQ ID NO: 294 - DNA, 273 bp, Brassica napus
atggagacgaagaatactcaagctgaaaacccgcctaagccagccatgtcttcgtgtagaaagatagtcaaggatgatgccaatttcttagaagacgtcaaggaccacattgatgaattcatcaatgcctccatggatgatcacaagaattgtttcaacaagaccatcaagaagatgtttggattatcgaaggctgttgcagagaagcagcaagctgaagaagctaaaggagtggagagttatttgcctcttcagacaactctctctgattag

SEQ ID NO: 295 - protein, 90 aa, Brassica napus
METKNTQAENPPKPAMSSCRKIVKDDANFLEDVKDHIDEFINASMDDHKNCFNKTIKKMFGLSKAVAEKQQAEEAKGVESYLPLQTTLSD

SEQ ID NO: 296 - DNA, 240 bp, Brassica napus
atggatagccagaaggataaggagccaaaaaaagctgcagtttctacgacatcatcttgcaggaagtatgccaatgatgacaacgccactttccttgcaaacctcaaagaccactttaacgagttcctcaatgcctctatggatgaacacaagacttgcttcaaaaacaccatcgacaagatattcgggaggtcaaaggaggttgagactaaggaagtcgagagtcgccctcctctttaa

SEQ ID NO: 297 - protein, 79 aa, Brassica napus
MDSQKDKEPKKAAVSTTSSCRKYANDDNATFLANLKDHFNEFLNASMDEHKTCFKNTIDKIFGRSKEVETKEVESRPPL

SEQ ID NO: 298 - DNA, 273 bp, Brassica napus
atggagacgcagaagactcaagctgaaaaccagcctaaaccagccatgtcttcgtgtagaaagatggtcaaggatgatgccaatttcttagaagacgtcaaggaccacattgatgagttcatcaatgcctccatggatgatcacaagaattgtttcaacaagaccatcaagaagatgtttggactgtcaaaggctgttgcagagaagcagcaagctgaagaagctaagggagtggagagttatttgccccttcagacaactctctctgattag

SEQ ID NO: 299 - protein, 90 aa, Brassica napus
METQKTQAENQPKPAMSSCRKMVKDDANFLEDVKDHIDEFINASMDDHKNCFNKTIKKMFGLSKAVAEKQQAEEAKGVESYLPLQTTLSD

SEQ ID NO: 300 - DNA, 483 bp, Betula pendula
atgggtgttttcaattacgaaactgaggccacctctgttatcccagcggctaggctattcaaggctttcatccttgatggagataatctctttccaaaggttgcaccgcaagccattagcagtgttgaaaacattgaaggaaatggagggcctggaaccatcaagaagatcagctttcccgaaggcatccctttcaagtacgtgaaggacagggttgatgaggtggaccacgcaaacttcaaatatagctacagcctaatcgagggagggcccgtgggcgatacattggagaagataagcaacgagataaagatagtggcaacccctgatggaggatccatcttgaagattagcaacaagtaccacaccaaaggcaaccatgaggtgaaggcagagcagattaaggcaagtaaagaaatgggcgagacacttttgagggccgttgagagctacctcttggcacactccgatgcctacaactaa

SEQ ID NO: 301 - protein, 160 aa, Betula pendula
MGVFNYETEATSVIPAARLFKAFILDGDNLFPKVAPQAISSVENIEGNGGPGTIKKISFPEGIPFKYVKDRVDEVDHANFKYSYSLIEGGPVGDTLEKISNEIKIVATPDGGSILKISNKYHTKGNHEVKAEQIKASKEMGETLLRAVESYLLAHSDAYN

SEQ ID NO: 302 - DNA, 483 bp, Betula pendula
atgggtgttttcaactacgaggatgaggccacctccgttattgctccggctaggctcttcaagtcctttgtccttgacgccgacaacctcattcccaaggttgcacctgagaacgttagcagtgccgaaaatattgaaggaaacggaggacctggaaccatcaagaagatcacctttcccgaaggaagccatttcaagtacatgaagcacagggttgatgagatcgaccacgcaaacttcaaatactgctacagcataatcgagggcggtccattgggcgacacactggagaagatctcttacgagatcaagattgtggccgcccctggtggaggatccatcttgaagatcaccagcaagtaccacaccaaaggcgacatttcgctcaatgaggaggagattaaggccggcaaagaaaagggcgccggacttttcaaggctgttgagaactacctcgtggcacacccaaatgcctacaactaa

SEQ ID NO: 303 - protein, 160 aa, Betula pendula
MGVFNYEDEATSVIAPARLFKSFVLDADNLIPKVAPENVSSAENIEGNGGPGTIKKITFPEGSHFKYMKHRVDEIDHANFKYCYSIIEGGPLGDTLEKISYEIKIVAAPGGGSILKITSKYHTKGDISLNEEEIKAGKEKGAGLFKAVENYLVAHPNAYN

SEQ ID NO: 304 - DNA, 258 bp, Brassica rapa
atggaagaacaaaagacacagatgacgttgtggtctatagcaaagtcccctctcatgtttggaggtgatgtgagaaagcttgatgacgctacttataatctcatcactaatcctacgcttctggaaatcaattcttatagctctaacaacatggagtttccttacatcacaccggcaagagtatctggggaaaagcacaacatccatcctcatgttctaacgggaaacaacgtttcaacgcacatgcatttgtcctga

SEQ ID NO: 305 - protein, 85 aa, Brassica rapa
MEEQKTQMTLWSIAKSPLMFGGDVRKLDDATYNLITNPTLLEINSYSSNNMEFPYITPARVSGEKHNIHPHVLTGNNVSTHMHLS

SEQ ID NO: 306 - DNA, 282 bp, Capsicum annuum
atggcagcagaaaatgtccaaaatgataagtcaccatcccctgttactccaaatccagctgctacttcatgtaggaagaagaagagcgaacaagcgtcttttctagaagatatcaaggatcacatggatgaattcattcatgcttccatggatgaacacaaaacctgcttcaagaagaccgtccaaaagatgtttggcatgtcaaaagttgttgcagaaaggaatgctgaggctaaagaggttgagagttcactgccactgcaaacaacactagctaaatag

SEQ ID NO: 307 - protein, 93 aa, Capsicum annuum
MAAENVQNDKSPSPVTPNPAATSCRKKKSEQASFLEDIKDHMDEFIHASMDEHKTCFKKTVQKMFGMSKVVAERNAEAKEVESSLPLQTTLAK

SEQ ID NO: 308 - DNA, 267 bp, Capsicum annuum
atgtcaaccgagaaggccccgcttgagcaaacatcacctgttgttgcatcatcatgccgaaaaaagaagtctgaaagtgccacatttttggaggatgtaaaggatcatattgatgagtttatacacgcttcgatggatgaacacaaatcttgctttaagaagaccatccagaagatgtttgggatgtctaaagttgttgctgaaagaaatgctgaaccaaaggaggttgagagctcacttcctctccgaactgttgtatctgagtaa

SEQ ID NO: 309 - protein, 88 aa, Capsicum annuum
MSTEKAPLEQTSPVVASSCRKKKSESATFLEDVKDHIDEFIHASMDEHKSCFKKTIQKMFGMSKVVAERNAEPKEVESSLPLRTVVSE

SEQ ID NO: 310 - DNA, 213 bp, Capsicum annuum
atgattgagcacatacacaaagttgttcatgttaaggaagaaaaacatgaactgtattatgattatttcttgaatagggtgttcagtcattttaaggtagtgtgcgaaagaggcacacctgggattgtaaagcgaatgttcactttgaacaccttgatagagaatgagagtgtttggggaaaagtgggaccaagtcccaagtttcagagttga

SEQ ID NO: 311 - protein, 70 aa, Capsicum annuum
MIEHIHKVVHVKEEKHELYYDYFLNRVFSHFKVVCERGTPGIVKRMFTLNTLIENESVWGKVGPSPKFQS

SEQ ID NO: 312 - DNA, 282 bp, Coffea canephora
atggcatctgaaaaaagccagcctgaagagcagcttgtatctacagctgttgactcacatacatcttcatgtagaaagcacagggctgaaaatgccaccttctttgaagacgtgaaggatcacattcatgacttcatccatgcttcactcgatgaccacaaagcatgttttaagaaaggcatccagaagatgtttgggatgtcaaaagttggagcagaaaggagttcagaagtggaggaggttgaaagttttctccatctaagcacttcagtgtgtaaatga

SEQ ID NO: 313 - protein, 93 aa, Coffea canephora
MASEKSQPEEQLVSTAVDSHTSSCRKHRAENATFFEDVKDHIHDFIHASLDDHKACFKKGIQKMFGMSKVGAERSSEVEEVESFLHLSTSVCK

SEQ ID NO: 314 - DNA, 273 bp, Coffea canephora
gagtcgcgtgcagcatctattcttgctggtctcagtttttcttcagaagtgcaaaagagagctacgaaaactttttctggaggatggaggatgagaatagctcttgcacgtgcattatttattgagcctgacatgttgctacttgatgaacccactaatcttcttgaccttcatgctgtcctgtggctggaatcgtacttggagatatggccgaagacatttattgttgtttctcatgctagagagttcttgaatacttgttgtcacatatat

SEQ ID NO: 315 - protein, 90 aa, Coffea canephora
MSGSINNARARAILILHPPEKVFVALFCTSEEKLRPARIDAARDSAASASINSRRLYISSSLCAMASLSTPASNFSSVLPSSPSMSTCLM

SEQ ID NO: 316 - DNA, 270 bp, Crypthecodinium cohnii
tctcctctgccctttaagaggatggcttcctggagcagacatgttctcaagttctcaatcatgtgggatgggtggtccagccttaaggcttctatgaaggtcgcagacgccaacatttgaatccgacactgggacttgtccaacgttgtggggaccttggacagccaaaaccgattcgatgacatgttgccaggcatccagtccaatcgttaagacgaatgccatgaaaaatgtacgaaggcacagagtgtgccatgcagcctcgaatcg

SEQ ID NO: 317 - protein, 89 aa, Crypthecodinium cohnii
MPGNMSSNRFWLSKVPTTLDKSQCRIQMLASATFIEALRLDHPSHMIENLRTCLLQEAILLKGRGEGEDAKAEEEAEAGGKPACVHQDV

SEQ ID NO: 318 - DNA, 270 bp, Cichorium intybus
atgacaacagagaagagccagcttccttctgttacacctccagccatggagtcctgtagaaagaagaagtcagatgacgccaccttccttcaggatgttaaagatcacatcgatgagtttataaatgcatccatggatgaacacaaaacctgcttcaaaaagacgatctcaaagatgtttggaatgtcaaaagttgtggcagaaagaaatgctgctgagaacaagggaattgaaagctcactgccccttcgaactgttgtttctgattag

SEQ ID NO: 319 - protein, 89 aa, Cichorium intybus
MTTEKSQLPSVTPPAMESCRKKKSDDATFLQDVKDHIDEFINASMDEHKTCFKKTISKMFGMSKVVAERNAAENKGIESSLPLRTVVSD

SEQ ID NO: 320 - DNA, 309 bp, Cryptomeria japonica
atggctcttcctcctccacccccaccttataggggtaaattatggtgtgtggttgatcttaaagcaaatatgtcggctttgccagatgccattacatatgcttgttctcagggtaacaacacctgcattgatatccaaccaggaaagccttgttatcagcctagttcggttgttagacatgcatcctatgctttcaatagctattggcagcaattcaagaactcaggggccagctgttatttcaatggagctgcaacaatggtcacaaagaaccctagttatggttcttgcagatacccatataactaa

SEQ ID NO: 321 - protein, 102 aa, Cryptomeria japonica
MALPPPPPPYRGKLWCVVDLKANMSALPDAITYACSQGNNTCIDIQPGKPCYQPSSVVRHASYAFNSYWQQFKNSGASCYFNGAATMVTKNPSYGSCRYPYN

SEQ ID NO: 322 - DNA, 453 bp, Caluromys lanatus
atgagaactctcaaggactacaacattcagatctcgtatggacgctttaataagaagcagaaaagaaactgtgagattgatttgttcatcatgcaagctgatggaaagaaaattcttgaccaaagtaaacagaacgcattgtcaaatcgcttacagatggaactgactcgtcccctgagagtagctgttttgagcagaggtcccgacacagagctctttgtagcaaacccaactgagttatctggcaagggtcgacctcttgtgttttatgacatcactcttgctctaaaattgctcgacatcggtatctttttggctgaaatcagacgccatttgatcggagaccgagaatgggaagtgtacagagtcatgcttgatgaaggagctgggtcttcggttccgagaaacaagatcgaggaaggagttcggaagatgttaatgggatgggcgtaa

SEQ ID NO: 323 - protein, 150 aa, Caluromys lanatus
MRTLKDYNIQISYGRFNKKQKRNCEIDLFIMQADGKKILDQSKQNALSNRLQMELTRPLRVAVLSRGPDTELFVANPTELSGKGRPLVFYDITLALKLLDIGIFLAEIRRHLIGDREWEVYRVMLDEGAGSSVPRNKIEEGVRKMLMGWA

SEQ ID NO: 324 - DNA, 255 bp, Centaurea maculosa
atgtcaaccgaaaaaaaccaggctccagccgtggaatcatgtcgaaagaagaagtcagatgatgcaactttcctgcaggatgtaaaagatcacatcgatgagttcatacatgcttctatggatgaacacaagacctgtttcaaaaagagcatctcaaagatgtttggaatgtctaagatcgtggcagagaggaatgctgctgaaaacaagggagtcgagagctcgcttccccttcgaacggttgtttctgattag

SEQ ID NO: 325 - protein, 84 aa, Centaurea maculosa
MSTEKNQAPAVESCRKKKSDDATFLQDVKDHIDEFIHASMDEHKTCFKKSISKMFGMSKIVAERNAAENKGVESSLPLRTVVSD

SEQ ID NO: 326 - DNA, 312 bp, Cucumis melo
cttagggcttgggtacctcaggatgatgcattttttaaacacgaacaatatcggcctgaagatatgactttcatgcaagaggaagaagtatttccacaacttgaagcagatgctccatgcacctccatcaaggaagaaggtgattctgttccttccacctccgttgaggcagatcatgtcacaaaagaaactaacggaaaaagtgaggagattgaaaccaaaaagaatgtgaagagaaaattgtctggcaatcaagttgaaaaaaaggaagcaaataaaggtcctgatggttggtttgaactaaaaataaat

SEQ ID NO: 327 - protein, 103 aa, Cucumis melo
MICLNGGGRNRITFFLDGGAWSICFKLWKYFFLLHESHIFRPILFVFKKCIILRYPSPKNPVPLVCRKEVSVFQILLIFLLHSIFFFVQLSILCCRLLKGRFY

SEQ ID NO: 328 - DNA, 588 bp, Chamaecyparis obtusa
atgaaagaagaaaatttaagaagaaagagagaaattgaagctgaattggaggctgagaaggaagctctccaggccagtgtaaatgaagaaatggtgtttctgaggcaagaggaacaagatctacagtctgcacagaagaaacatgagcgcaatgctgagtctgtgactggtgaaatgtttgtagagtgccaggaactacttcaaatgtttggtttgccgtacatcattgcaccaatggaagcagaagcccaatgtgcatatcttgaatgcacacatttagttgatggtgttgtaactgatgattgtgatgtattcctatttggtgctggtagtgtatacaagaatatctttgatgagcggaagtatgttgagacttactttatgaaggacattgaggaggagcttggtttgaatagggaaaagctaatccgcatggctttgcttcttggaagtgattatacagaggggatcagactcaacttcgtttggaggcattctacagcttcaatgaaaggtttgctaaaattcgcagtcgaagaattcagaaggctgtcactggaatcacagggcgtcgctcagcagatttga

SEQ ID NO: 329 - protein, 195 aa, Chamaecyparis obtusa
MKEENLRRKREIEAELEAEKEALQASVNEEMVFLRQEEQDLQSAQKKHERNAESVTGEMFVECQELLQMFGLPYIIAPMEAEAQCAYLECTHLVDGVVTDDCDVFLFGAGSVYKNIFDERKYVETYFMKDIEEELGLNREKLIRMALLLGSDYTEGIRLNFVWRHSTASMKGLLKFAVEEFRRLSLESQGVAQQI

SEQ ID NO: 330 - DNA, 309 bp, Carica papaya
atggtttcatatacgggaaatgttagaatggaatcacaaagaagtcaacctgaaaagcagtcgtctactgctaccccaatgcctgctgttacttcatgccgaaagaagaagactgacgatgccactttctttgaggatttgaaggaccacattgatgagttcgtccatgcatcaatggatgaacacaaaacctgcttcaagaagaccctccaaaagatgtttggaatgtcaaaagttgttgcaggaaggagtgctgagactaacggagttgaaagttctcttccccttcaaacaacagtttcagattag

SEQ ID NO: 331 - protein, 102 aa, Carica papaya
MVSYTGNVRMESQRSQPEKQSSTATPMPAVTSCRKKKTDDATFFEDLKDHIDEFVHASMDEHKTCFKKTLQKMFGMSKVVAGRSAETNGVESSLPLQTTVSD

SEQ ID NO: 332 - DNA, 270 bp, Cyclamen persicum
atgtacttgtcagatgtagaagaaggcggtgagactgtttttccggaagctaagggaaacattagttcagtgccgtggtggaacgacctatctgaatgtggtaaaaagggtctctctgttaagcctaggatgggtgatgctttgcttttttggagtatgcatcctgatggcacattagactcatccagtcttcatggtggttgcccagtgattaaaggaaacaaatggtcctctaccaagtggttgcatgtcgagaaatacaaggtctaa

SEQ ID NO: 333 - protein, 89 aa, Cyclamen persicum
MYLSDVEEGGETVFPEAKGNISSVPWWNDLSECGKKGLSVKPRMGDALLFWSMHPDGTLDSSSLHGGCPVIKGNKWSSTKWLHVEKYKV

SEQ ID NO: 334 - DNA, 270 bp, Cyclamen persicum
atgtacctctcggatgtagaagaaggtggtgagacagtttttcctactgctaaaggaaatattagctcagtcccttggtggagcgagctttctgaatgtgggaaagaggggctctctgttaagccaaagatgggagatgccttgcttttctggagcatgaaacctgacgccactctggattcttcaagtttgcacggtggctgccccgttattaaagggaacaagtggtcctcaacaaaatggatgcgtgtgaatgagtataaggtgtaa

SEQ ID NO: 335 - protein, 89 aa, Cyclamen persicum
MYLSDVEEGGETVFPTAKGNISSVPWWSELSECGKEGLSVKPKMGDALLFWSMKPDATLDSSSLHGGCPVIKGNKWSSTKWMRVNEYKV

SEQ ID NO: 336 - DNA, 627 bp, Ceratopteris richardii
atgcaggagggccgagagtctgcgtatggtggagcgagcgaacgagcttcgtcagctagcatccatttctcactgactcccggtgtatatcgttgcgttgcgtttcgttcctcactgtggaccatacctgcatccatggactctcatcgccatttcgtgaagagctgtaggcgtattatcatcaaggttggtacaaatgtggtgacacgtgcagaagatgggaagtttgctttaggccgtatcggtgcgctatgtgaacaggtgaaggagttagttgaatcaggtattgaagtcatcatagttacatctggagctgtaggtatgggatattgtcttcttcgtcagtacaggaccctaaatacaagctttgcagatttggcaaagtcagaggctcaaccagatggaaaggcatgtgctgccgtgggtcaaagtggcttgattatgctctacgacacgctctttagcctgttagatgtagcatcatctcagcttcttgttaccagccgggacttttgcaacaaggatttcaggaaacaactcgttgatactgtcaactcccttgttgatatgcaagtggttcctatatttaatgagaatgatgcgatcagcacgcggggagacatttag

SEQ ID NO: 337 - protein, 208 aa, Ceratopteris richardii
MQEGRESAYGGASERASSASIHFSLTPGVYRCVAFRSSLWTIPASMDSHRHFVKSCRRIIIKVGTNVVTRAEDGKFALGRIGALCEQVKELVESGIEVIIVTSGAVGMGYCLLRQYRTLNTSFADLAKSEAQPDGKACAAVGQSGLIMLYDTLFSLLDVASSQLLVTSRDFCNKDFRKQLVDTVNSLVDMQVVPIFNENDAISTRGDI

SEQ ID NO: 338 - DNA, 375 bp, Cycas rumphii
atgacagagttgtggctcgataaattctataagaagacaaccaacttaccagagcctttcccacatgaacttgttgagcgtctagaaaaatatcttgataatctggaagagcagttggttgatctatcctcactgttgtttgaccaccgtctggaggatgcccatcgtaactcctccgaaatattccaaaatacaatatttacgcagcaatacgtacagcgtgtattaatatccgagaaggacaaaatgagatgttgttcagtggaatacgaagctcctgttcaaacctctcaaacatttgtttatggcggaattttagttgccggttttattgtttactttcttgttatattcttctcgtcaccagaacgctga

SEQ ID NO: 339 - protein, 124 aa, Cycas rumphii
MTELWLDKFYKKTTNLPEPFPHELVERLEKYLDNLEEQLVDLSSLLFDHRLEDAHRNSSEIFQNTIFTQQYVQRVLISEKDKMRCCSVEYEAPVQTSQTFVYGGILVAGFIVYFLVIFFSSPER

SEQ ID NO: 340 - DNA, 291 bp, Cycas rumphii
atggataaggaggtatcccatacatatccaactacagaaaagaaatcatcaccatccacaccctcagaaatgacatcatgcaggaagaagaaatctgcagacagctcatttgtggctgacttgatggatcacattgatgagtttgtccatgcctctatggatgagcacaaaacttgcttccaaaagaccattcgaaagatgtttggactgtcaaaaaaggttgcagaggaaaatgcaagccctgtgccagtggagagtgtcctccctcttcaaacaacaacatcaggatag

SEQ ID NO: 341 - protein, 96 aa, Cycas rumphii
MDKEVSHTYPTTEKKSSPSTPSEMTSCRKKKSADSSFVADLMDHIDEFVHASMDEHKTCFQKTIRKMFGLSKKVAEENASPVPVESVLPLQTTTSG

SEQ ID NO: 342 - DNA, 204 bp, Cycas rumphii
taacgggtgaattgccgtttttcggggcaaacatacaatctcaacggggcctaaccaggatttggatctttctttgtgctcctgattggagatgggtttttgattgtgccaagcgtgcaggaaatagtgtataggttttctttggcagaaggtatagtattgttgttggtgagaattgaactttgttggaagagatgggagggg

SEQ ID NO: 343 - protein, 67 aa, Cycas rumphii
MRHKHCYVPRVESLHGCLDVIQIPSNQPNSHKICSRPPRYLKLQANWTFVALKRMIMMMMCCQGSHK

SEQ ID NO: 344 - DNA, 270 bp, Cucumis sativus
  misc_feature (246)..(246): n is a, c, g, or t
caaatgcagggaacatgctgaggcaaagcacccgaaatctgatgtccacacttgtttcccacatcttaaaaaatgaaagaataaacaagaaagaatactgtcaaggcacgctctgatagcaacctcctcgcctcattgtttagatgtgaatctttgccatttcgactctgtagcaggatgcacgatttcttgtcttgaactgtgtttgcacgctatttggtgtgtttatttatggtaatgctcccncatgtatcagaaaattggctttga

SEQ ID NO: 345 - protein, 89 aa, Cucumis sativus
MWETSVDIRFRVLCLSMFPAFDLRRRADKGLHAYLALNRHCFLVCFKLTSLRSSFQLLHVLLAGHLRFLAVPSTHFHEEPRENLTSLKP

SEQ ID NO: 346 - DNA, 282 bp, Citrus sinensis
atggaaacgcaaaagattcagcaggagaaacaatcatcacctgttgctccaactcctgccatgacttcatgtcgaaagaagaagaaagatgatgccactttcttggaggatttgaaagatcacatcgatgagtttgtaaatgcatcaatggaggaacacaaaacttgtttttcaaagaccatcaaaaagatgtttggtatgtcaaaagttgtagcagaaaggaatgctaacacccaggaagttgaaagctccctgccccttcagacaacaatttcagattaa

SEQ ID NO: 347 - protein, 93 aa, Citrus sinensis
METQKIQQEKQSSPVAPTPAMTSCRKKKKDDATFLEDLKDHIDEFVNASMEEHKTCFSKTIKKMFGMSKVVAERNANTQEVESSLPLQTTISD

SEQ ID NO: 348 - DNA, 672 bp, Citrus sinensis
atggattctccaatcaaggtgactagatcaactagtgtaaaaaatggcgacatagaggtgcaaagttgggcttcatcatcttctaaatccagcaagaataaaattttcccatttagtactgccttatcaagctctgttccacgtaatgattctattactagctccttgaaatcaaagtttgataatggcgttttcttgacgtggaaggatctttcggttgtggttccaagtggtaaaaaagaaaatcgtaaacatgcaattttgcaagagctgacaggatatgttgaaccaggccagatattagccatcatgggtccttctggttgtggcaagtctactcttcttgatgcactagcaggaaggttaagttcaaacactgagcagactggggagattcttatcaatggtcgcaaagagacgcttgcttttggaacttcggcctacgtgactcaagaagacactctaatgacaacattaacagtaatggaagctatatactattctgcacagttgcagctaccagattccatgtcaagatctcagaagagagaaagagctgaaatgactattagagaaatgggattacaggacgccatggacaccagaataagaggatggaacgtaagaaggattaacggtggacaaaaaagaaaggttagcattttgcattga

SEQ ID NO: 349 - protein, 223 aa, Citrus sinensis
MDSPIKVTRSTSVKNGDIEVQSWASSSSKSSKNKIFPFSTALSSSVPRNDSITSSLKSKFDNGVFLTWKDLSVVVPSGKKENRKHAILQELTGYVEPGQILAIMGPSGCGKSTLLDALAGRLSSNTEQTGEILINGRKETLAFGTSAYVTQEDTLMTTLTVMEAIYYSAQLQLPDSMSRSQKRERAEMTIREMGLQDAMDTRIRGWNVRRINGGQKRKVSILH

SEQ ID NO: 350 - DNA, 564 bp, Citrus sinensis
atggattctccaatcaaggtgactagatcaactagtgtaaaaaatggcgacatagaggtgcaaagttgggcttcatcatcttctaaatccagcaagaataaaattttcccatttagtactgccttatcaagctctgttccacgtaatgattctattactagctccttgaaatcaaagtttgataatggcgttttcttgacgtggaaggatctttcggttgtggttccaagtggtaaaaaagaaaatcgtaaacatgcaattttgcaagagctgacaggatatgttgaaccaggccagatattagccatcatgggtccttctggttgtggcaagtctactcttcttgatgcactagcaggaaggttaagttcaaacactgagcagacctggggagattcttatcaatggtcgcaaagagacgcttgcttttggaacttcggcctacgtgactcaagaagacactctaatgacaacattaacagtaaatggaagctatatacttattctgcacagttgcagctaccagattccatgtcaagatctccaaaagaagaaaagaactga

SEQ ID NO: 351 - protein, 187 aa, Citrus sinensis
MDSPIKVTRSTSVKNGDIEVQSWASSSSKSSKNKIFPFSTALSSSVPRNDSITSSLKSKFDNGVFLTWKDLSVVVPSGKKENRKHAILQELTGYVEPGQILAIMGPSGCGKSTLLDALAGRLSSNTEQTWGDSYQWSQRDACFWNFGLRDSRRHSNDNINSKWKLYTYSAQLQLPDSMSRSPKEEKN

SEQ ID NO: 352 - DNA, 636 bp, Citrus sinensis
atggattctccaatcaatgtgactagatcaactagtgcaaaaaatggcgacatagaggtgcaaagttgggcttcatcatcttctagatccagcaagaacaaaattttcccatttagcactgctttatcaagctctgttccacgtaatgattctgttactagctccttgaaatcaaagtttgataatggcgttttcttgacgtggaaggatctttcggttgtggttccaagtggtaaaaaagaaaatcgtaaacatgcaattttgcaagagctgacaggatatgttgaaccaggccagatattagccatcatgggtccttctggttgtggcaagtctactcttcttgatgcactagcaggaaggttaagttcaaacactgagcagactggggagattcttatcaatggtcgcaaagagacgcttgcttttggaacttcggcctacgtgactcaagaagacactctaatgacaacattaacagtaatggaagctgtatactattctgcacagctgcagctaccagattctatggcaagatctgagaagagaaacagacctgaaatggctattaaagaaatggggaaacagggacgcctggaacccaaaatagggaggatggaatgtacgaggggatag

SEQ ID NO: 353 - protein, 211 aa, Citrus sinensis
MDSPINVTRSTSAKNGDIEVQSWASSSSRSSKNKIFPFSTALSSSVPRNDSVTSSLKSKFDNGVFLTWKDLSVVVPSGKKENRKHAILQELTGYVEPGQILAIMGPSGCGKSTLLDALAGRLSSNTEQTGEILINGRKETLAFGTSAYVTQEDTLMTTLTVMEAVYYSAQLQLPDSMARSEKRNRPEMAIKEMGKQGRLEPKIGRMECTRG

SEQ ID NO: 354 - DNA, 228 bp, Centaurea solstitialis
atggtttatagaaacatacaagaaaagaagcaacatgaaaccagccttgttagagcttgctgtattggatttcaacattgttcaaggaatacatcaagaagatctgaagtattcatcaaggtggtgggacggtctacgatgggacaagaagctgagctttgctcgagacagattggtggagagttttatgtggtcggtgggttcacattacgaaccaccatttggtga

SEQ ID NO: 355 - protein, 75 aa, Centaurea solstitialis
MVYRNIQEKKQHETSLVRACCIGFQHCSRNTSRRSEVFIKVVGRSTMGQEAELCSRQIGGEFYVVGGFTLRTTIW

SEQ ID NO: 356 - DNA, 270 bp, Centaurea solstitialis
atgacaaccgaagaaagtgcaccacccattgcttctgctccagaaatgacatcatgtcgtaggaaaaaatcagaggatgcaactttcttgcaggatgtgaaagatcacatcgatgaatttataaacgcgtcgacggatgaacataagacgtgtttccaaaagactatcttaaagatgtttggaatgtctaaagtggttgcgaaaagaaatgccgatgataagaaggaagttgagagttcattgcccctacgaacggtcatttctgagtag

SEQ ID NO: 357 - protein, 89 aa, Centaurea solstitialis
MTTEESAPPIASAPEMTSCRRKKSEDATFLQDVKDHIDEFINASTDEHKTCFQKTILKMFGMSKVVAKRNADDKKEVESSLPLRTVISE

SEQ ID NO: 358 - DNA, 288 bp, Centaurea solstitialis
atggcaaccgaaaaaagccaggctccagccatggaatcatgtcgaaagaagaaatcagatgatgcaactttcctgcaggatgtgaaagatcacatcgatgagtttatacatgcttctatggatgaacacaagacctgtttcaaaaagagcatctcaaagatgtttggaatgtccaagatcgtggcagagaggaatgctgctgaaaacaagggagtcgagagctcgcttccccttcgtacagttgtttctgattacatagaaaagatgatggtttacgctataatataa

SEQ ID NO: 359 - protein, 95 aa, Centaurea solstitialis
MATEKSQAPAMESCRKKKSDDATFLQDVKDHIDEFIHASMDEHKTCFKKSISKMFGMSKIVAERNAAENKGVESSLPLRTVVSDYIEKMMVYAII

SEQ ID NO: 360 - DNA, 273 bp, Cyamopsis tetragonoloba
  misc_feature (195)..(195): n is a, c, g, or t
  misc_feature (211)..(211): n is a, c, g, or t
atggaaactcagaaaacacaacctgataaaccttcttcaccaccggtggttacttcatgtcgaaagaagaagaatgaagaagccacttttttggaggatttgaaggaccacattgacgaattcattcatgcttctatggatgaacacaaaacttgcttcaagaaaactgtccagaagatgttcggtttgtccaangttgttgctgaaaggnatgccaatgctgggaaagaagttgaaagttctctgcatcttcagacaactttagcagactag

SEQ ID NO: 361 - protein, 90 aa, Cyamopsis tetragonoloba
  misc_feature (65)..(65): Xaa can be any naturally occurring amino acid
  misc_feature (71)..(71): Xaa can be any naturally occurring amino acid
METQKTQPDKPSSPPVVTSCRKKKNEEATFLEDLKDHIDEFIHASMDEHKTCFKKTVQKMFGLSXVVAERXANAGKEVESSLHLQTTLAD

SEQ ID NO: 362 - DNA, 492 bp, Carthamus tinctorius
atgtggggggcatacctgactcattcagcggttgtgggcttgtggctatgggagcgtcccaagcttcgaacccaagaccattcgattttggacaaacactacccccgcccgttaccaactgagctacgtgtcgccattggcgatccattacccattttgttaattttaatttcatctgaaaatttcgaaggtgaccgctttttattgggcatcaaaccaacgatgacaaccgaagaaagtgcaccacccattgcttctgctccagaaatgacatcatgtcgtaggaaaaagtcagaggatgcaactttcttgcaggatgtgaaagatcacatcgatgaatttataaacgcatcgacggatgaacataagacatgtttccaaaagaccatcttaaagatgtttggaatgtctaaagttgttgcagtaagaaatgccgatgataagaaggaagttgaaagttcattgtccctacgaacggtcatttctgagtag

SEQ ID NO: 363 - protein, 163 aa, Carthamus tinctorius
MWGAYLTHSAVVGLWLWERPKLRTQDHSILDKHYPRPLPTELRVAIGDPLPILLILISSENFEGDRFLLGIKPTMTTEESAPPIASAPEMTSCRRKKSEDATFLQDVKDHIDEFINASTDEHKTCFQKTILKMFGMSKVVAVRNADDKKEVESSLSLRTVISE

SEQ ID NO: 364 - DNA, 273 bp, Carthamus tinctorius
atggcaaccgaaaaaagccaggctccagccatggaatcatgtcgaaagaagaagtcagatgatgcaactttcctgcaggatgtgagagatcacatcgatgagttcatacatgcttctatggatgaacacaagacctgtttcaaaaagagcatctcaaagatgtttggaatgtctaagatcgtggcagagagaaatgctgctgctactgctactgctgctgaaaacaagggaatcgagagctcgcttccccttcgtacagctgtttctgattag

SEQ ID NO: 365 - protein, 90 aa, Carthamus tinctorius
MATEKSQAPAMESCRKKKSDDATFLQDVRDHIDEFIHASMDEHKTCFKKSISKMFGMSKIVAERNAAATATAAENKGIESSLPLRTAVSD

SEQ ID NO: 366 - DNA, 579 bp, Carthamus tinctorius
atggctagtagagcagattcagacgtcgatgatgattttagcgaactctacaaggaatacactggtcctccaagatctaataccactggtgtgcctgaaaccgcaaaaacaagcaaaaggtcccatgctggttcagatgaagaagaggaacctctagatcctaatgctgtccctacagattttactagccgtgaagctaaggtttgggaggcaaaatctaaagctactgaaaggaactggaagagaagaagaagaaggaaatttcaagcaagcttgtgtcgcaagataaaattcttggataccaagatggcaaccgaaaaaagccaggctccagccatggaatcatgtcgaaagaagaagtcagatgatgcaactttcctgcaggatgtgagagatcacatcgatgagttcatacatgcttctatggatgaacacaagacctgtttcaaaaagagcatctcaaagatgtttggaatgtctaagatcgtggcagagagaaatgctgctgctactgctactgctgctgaaaacaagggaatcgagagctcgcttccccttcgtacagctgtttctgattag

SEQ ID NO: 367 - protein, 192 aa, Carthamus tinctorius
MASRADSDVDDDFSELYKEYTGPPRSNTTGVPETAKTSKRSHAGSDEEEEPLDPNAVPTDFTSREAKVWEAKSKATERNWKRRRRRKFQASLCRKIKFLDTKMATEKSQAPAMESCRKKKSDDATFLQDVRDHIDEFIHASMDEHKTCFKKSISKMFGMSKIVAERNAAATATAAENKGIESSLPLRTAVSD

SEQ ID NO: 368 - DNA, 345 bp, Descurainia sophia
  misc_feature (272)..(272): n is a, c, g, or t
ggggtcttscggtgggggggctggggggttcttctccccgggggggcgggggggggggtsggggtctgcgggggcggggccgtkgggtctgttccgggggggggtggggtggtcgcggggggtgtcgtgctgggtcgggtttctggttcctcgtcgtgtgggttggkggggggggcgttctgggggtggggggtkgtcgcgktttggggttgggcccgcggggtccgcgggggggtgggtccttktccggggggtcgttgtttgtgggcggnctgggggtctccggcgggttcgcgggtccgggcggggggktgggcggggcggggtttcttggggggctgggtt

SEQ ID NO: 369 - protein, 114 aa, Descurainia sophia
  misc_feature (64)..(64): Xaa can be any naturally occurring amino acid
MVAVARTRKTQTAFSFSFVAHLSLRHIYNPEEESLFYYPITSLSLDPLYLLPISSTETAIFESXTVTSQSSLSLFSLVLISSSFCYSHSHQDPLKICFHLISQIRFGLSSPIFC

SEQ ID NO: 370 - DNA, 258 bp, Euphorbia esula
atggatgctcaaagcagtgaacaaaagaaacaggccccttcgtgccggaagaagaagaatgaggaagctacttttcttgaggatgtgaaagatcatatagatgaatttattcatgcttctatggatgaacacaagagttgctttaaaaatactatacaaaagatgtttggaatgtcaaagattgttgcagagaggaatgctgctgaagccaaagaagttgaaagttctttgcctcttcgcaccgttgtatcagactag

SEQ ID NO: 371 - protein, 85 aa, Euphorbia esula
MDAQSSEQKKQAPSCRKKKNEEATFLEDVKDHIDEFIHASMDEHKSCFKNTIQKMFGMSKIVAERNAAEAKEVESSLPLRTVVSD

SEQ ID NO: 372 - DNA, 375 bp, Euphorbia esula
atggagagttcatatgataatgaagaggagtatgcaagaaaagatgtgaatgatgtttctcttggagaactaagagatagggttgatgaatttgctaaagctagaggatgggagcactaccatagtcctagaaatctccttttagcagttgtaggagaagtgggagagctatcagaaatattccaatggaaaggagaggtagaaaaagggttaccaaaatggagtttggaagaaaaagagcatcttgaggaagagctttcagatgttttgctctatcttattcgtctttctgatgtctgtggaatagatcttggccaggctgctttgtctaagcttctcaaaaatgctatcaaatatcctgtttctaaatattaa

SEQ ID NO: 373 - protein, 124 aa, Euphorbia esula
MESSYDNEEEYARKDVNDVSLGELRDRVDEFAKARGWEHYHSPRNLLLAVVGEVGELSEIFQWKGEVEKGLPKWSLEEKEHLEEELSDVLLYLIRLSDVCGIDLGQAALSKLLKNAIKYPVSKY

SEQ ID NO: 374 - DNA, 333 bp, Euglena gracilis
ggtgtatgtctccctatccgcaacgctgctattggaccccaccgtcaagtccaacacctctaaaatggcgtttgtgattgcctccttggcttctgcaaccttcctctgtgtcagcattctgatggaacgcttgcgtcgtaccacgttcctgaacgaggccctcctaacccgagagatgcaagcgtcgcaaatggccgactcaatgctgaaccacaccctgaagaacctgctggcggacgtggcggccagcctcgaggtgtacctggcgggggaggcgcccagcggcgcactggaggacagcgtgacgtgtctgcggcggggcatgatggcgtg

SEQ ID NO: 375 - protein, 110 aa, Euglena gracilis
MPRRRHVTLSSSAPLGASPARYTSRLAATSASRFFRVWFSIESAICDACISRVRRASFRNVVRRKRSIRMLTQRKVAEAKEAITNAILEVLDLTVGSNSSVADRETYTTT

SEQ ID NO: 376 - DNA, 279 bp, Euglena gracilis
atgtgcaccacctatcaagagttctccgacaagttggacaagctcgatgcggagtttgccaagaagatggaggaccagaacaaaaagttctttgcggacaaacccgacgactccactttgtcaccggaaatgaaggaacactatgacaaattcgaaaagatgatcaaggagcacacagacaagttcaataagaagatgcgagaccactcagagcacttcaaacagaagtttgctgagcttttggagcaacagaagaacgcgcagttcccaggcaagtaa

SEQ ID NO: 377 - protein, 92 aa, Euglena gracilis
MCTTYQEFSDKLDKLDAEFAKKMEDQNKKFFADKPDDSTLSPEMKEHYDKFEKMIKEHTDKFNKKMRDHSEHFKQKFAELLEQQKNAQFPGK

SEQ ID NO: 378 - DNA, 240 bp, Eucalyptus grandis
  misc_feature (145)..(145): n is a, c, g, or t
  misc_feature (182)..(182): n is a, c, g, or t
  misc_feature (235)..(235): n is a, c, g, or t
atgatcgtgtttcctctggaacatttactgtgctttcatacaacattttggctgatgtttatgcctccagtgagttttacaagttactgcccttcatgggctctttcttggcaatatcgcagacagaatttgctacgggaaatanttggttatcgtgcagacattgtttgcctacaagaggntcaaagtgatcattttgaggagtttttcgcccctgaattagacaaacatgggntatga

SEQ ID NO: 379 - protein, 79 aa, Eucalyptus grandis
  misc_feature (49)..(49): Xaa can be any naturally occurring amino acid
  misc_feature (61)..(61): Xaa can be any naturally occurring amino acid
  misc_feature (79)..(79): Xaa can be any naturally occurring amino acid
MIVFPLEHLLCFHTTFWLMFMPPVSFTSYCPSWALSWQYRRQNLLREIXGYRADIVCLQEXQSDHFEEFFAPELDKHGX

SEQ ID NO: 380 - DNA, 411 bp, Euphorbia lagascae
atggataccacaaactccaaaatctccatccccacctcttccagacgaccttccacccgcctcttgtttgaccgccgttacggttgggtgtttgatgaatggaaagatccttctgaggaagctctagctggaggccgcggaatgttctgcatattgcctctagcaaaaagtttcctgaactccgccacacagtcggttaaccttgctgcaaattttgctgtcaaagtttacgagaggccagatcttttctcccctcgggcactgcaggaaaatcttcataagcagcttcaaatattcaattctaccccgaagaatccagaaatcagcagctgtttgactgtcgaagataaatttccatcacaaatttccacttctgcttcacatctacagataaaaactggaaagtcatag

SEQ ID NO: 381 - protein, 136 aa, Euphorbia lagascae
MDTTNSKISIPTSSRRPSTRLLFDRRYGWVFDEWKDPSEEALAGGRGMFCILPLAKSFLNSATQSVNLAANFAVKVYERPDLFSPRALQENLHKQLQIFNSTPKNPEISSCLTVEDKFPSQISTSASHLQIKTGKS

SEQ ID NO: 382 - DNA, 366 bp, Eucalyptus tereticornis
  misc_feature (298)..(298): n is a, c, g, or t
  misc_feature (344)..(344): n is a, c, g, or t
atggatgacaatggtgttggcagggcagcgaccaagggacttctcctacatctgggatgtgatgtgacaaccgtaagctcgggggatgagttgttgcatgctgtctctcaggaacacaaggtagttcttatggatatttgcacgcctggtatagacagttacgaagttgccgtccagatacacaggttgtattcacaacatcatgagaggccactcttagtggcaatcactggaagcactgacaaggtaaccaaagagaattgcatgagggttgggatgggatggtgttatcaaaaanctgtgtcccttgataaaatgagaaacgtactgtctgagctactggnatgtgggacatcaaatgtctaa

SEQ ID NO: 383 - protein, 121 aa, Eucalyptus tereticornis
  misc_feature (100)..(100): Xaa can be any naturally occurring amino acid
  misc_feature (115)..(115): Xaa can be any naturally occurring amino acid
MDDNGVGRAATKGLLLHLGCDVTTVSSGDELLHAVSQEHKVVLMDICTPGIDSYEVAVQIHRLYSQHHERPLLVAITGSTDKVTKENCMRVGMGWCYQKXVSLDKMRNVLSELLXCGTSNV

SEQ ID NO: 384 - DNA, 345 bp, Eucalyptus tereticornis
  misc_feature (148)..(148): n is a, c, g, or t
  misc_feature (176)..(176): n is a, c, g, or t
  misc_feature (209)..(209): n is a, c, g, or t
  misc_feature (263)..(263): n is a, c, g, or t
  misc_feature (265)..(265): n is a, c, g, or t
  misc_feature (273)..(273): n is a, c, g, or t
  misc_feature (306)..(306): n is a, c, g, or t
  misc_feature (330)..(330): n is a, c, g, or t
atgtcttcgccttcttcatctaatcttcctctgaaagcaatccccggagattatggcttgcctttcttcggcgcgataaaagaccggctggactacttctaccatgagggtacagacaaattcttccggacccggatgcagaagtacnagtcgacggtcttccggtcaaacatggntcccggccctttcatggcccggaaccctaaggncgtcgtgctcctcgatgccatcagcttcccgattctctttgacacgtctaaggncnaaaaaaangatgtgtttgtcgcaacctacatgccttcgatnaacttcaaggggcgggtaccgtgngtgcgcctaacttga

SEQ ID NO: 385 - protein, 114 aa, Eucalyptus tereticornis
  misc_feature (50)..(50): Xaa can be any naturally occurring amino acid
  misc_feature (59)..(59): Xaa can be any naturally occurring amino acid
  misc_feature (70)..(70): Xaa can be any naturally occurring amino acid
  misc_feature (88)..(89): Xaa can be any naturally occurring amino acid
  misc_feature (91)..(91): Xaa can be any naturally occurring amino acid
  misc_feature (102)..(102): Xaa can be any naturally occurring amino acid
  misc_feature (110)..(110): Xaa can be any naturally occurring amino acid
MSSPSSSNLPLKAIPGDYGLPFFGAIKDRLDYFYHEGTDKFFRTRMQKYXSTVFRSNMXPGPFMARNPKXVVLLDAISFPILFDTSKXXKXDVFVATYMPSXNFKGRVPXVRLT

SEQ ID NO: 386 - DNA, 324 bp, Euphorbia tirucalli
atgcttgatgatagagggacttgtaagattactggcctcccaagaagttcacttcctcaagaaccagccatgggtgatgagaatgcagttactctttttgtacgattgccagatggcaggcgctgcagttgccgatttttcaagtccgacaaggttcagttcctttatgacttcattgactctggcagactagtggagccaccaacttacaatctggttaggccatatcctagatgtatcttttctacaagtgacagctcattgagtttgaatgaagttggtctcacccacatacagggagccttatttttggagatgatatag

SEQ ID NO: 387 - protein, 107 aa, Euphorbia tirucalli
MLDDRGTCKITGLPRSSLPQEPAMGDENAVTLFVRLPDGRRCSCRFFKSDKVQFLYDFIDSGRLVEPPTYNLVRPYPRCIFSTSDSSLSLNEVGLTHIQGALFLEMI

SEQ ID NO: 388 - DNA, 294 bp, Festuca arundinacea
atggattccaccaatgcacagcctgaaggttcaaagccatctgctccccaaaaccccgccatggcttcgtgccggaagaagaaaactgatgatgctaccttccttgaagatgtgaaagagcacatcgacgagttcatcaacgcctccatggacgagcacaagacctgcttcaagaagaccatttcgaagatgtttggcatgtcaaagattgttgcggagcggtccgctgcagcagcagcaaaggaagctgaagtcgagagcgctttgcctcttcagaccagcgtgtcccagtag

SEQ ID NO: 389 - protein, 97 aa, Festuca arundinacea
MDSTNAQPEGSKPSAPQNPAMASCRKKKTDDATFLEDVKEHIDEFINASMDEHKTCFKKTISKMFGMSKIVAERSAAAAAKEAEVESALPLQTSVSQ

SEQ ID NO: 390 - DNA, 375 bp, Fragaria vesca
atgggtgacaacttttgtaatgaaaacttgtttcaggtgttggtgaagatggaatcacagaaaagccaagttgaaaatcagcctattgaaccaaccactactgcacttgctgctggaacaacccctactccccctgctgctgctgcaacccccacatcatgccgaaaaaagaagaatgaacaagctactttcttggaagatgtgaaggatcacattgatgagtttatccacgcttctatggatgaacatgtgtcttgcttcaagaagaccattgacaagatgtttaaaatgtcaaaggttgttgctgagaagaatgctgctgatgccaagggagttgagagttctttgccgcttcaaacaactgtagcagactga

SEQ ID NO: 391 - protein, 124 aa, Fragaria vesca
MGDNFCNENLFQVLVKMESQKSQVENQPIEPTTTALAAGTTPTPPAAAATPTSCRKKKNEQATFLEDVKDHIDEFIHASMDEHVSCFKKTIDKMFKMSKVVAEKNAADAKGVESSLPLQTTVAD

SEQ ID NO: 392 - DNA, 285 bp, Gossypium hirsutum
atggacacgcaaaagagtcaacccgacgagcaaaagagtcaacccgacaaacaatcgtcgtctgctgctgctcccctagtctcgacttcgtgtaggaagaaaaagaacgaagaggccaccttccttgaagacttgaaggatcacatcgatgagttcattaatgcttcaatggaagagcacaaaacttgctttaagaagaccatccagaagatgtttgggatgtcgaaagttgtagcagaaaggagtgcggctgaatccaaggaagctgaaaccgtgtcgaaataa

SEQ ID NO: 393 - protein, 94 aa, Gossypium hirsutum
MDTQKSQPDEQKSQPDKQSSSAAAPLVSTSCRKKKNEEATFLEDLKDHIDEFINASMEEHKTCFKKTIQKMFGMSKVVAERSAAESKEAETVSK

SEQ ID NO: 394 - DNA, 237 bp, Gossypium hirsutum
atggaaacacaaaagagccaggccgagaaacaagcgacgatggcttcatgtagaaagaaaaagaatgaagaagccaccttccttgaagacttgaaggatcacatcgatgagtttgttaatgcatcaatggatgagcataaaacttgctttaagaagaccatccaaaagatgtttggaatgtcaaaaattgtagctgaaaggaatgctgaatcaaaggaaacaacagtatcaaaataa

SEQ ID NO: 395 - protein, 78 aa, Gossypium hirsutum
METQKSQAEKQATMASCRKKKNEEATFLEDLKDHIDEFVNASMDEHKTCFKKTIQKMFGMSKIVAERNAESKETTVSK

SEQ ID NO: 396 - DNA, 351 bp, Glycine max
atgatttctattgttgcagttgcattgcagccaaagccaagtgatccctcattgatcttccctttcctcaaagtgctcgctagaatggattccaacaacaagcagactgatgagaaacgaccagcatcaagagactcattctgccaaagaaagaagtctgagaatgggagttttgtgtctaatttaagaaatcactttcatgaatttatacatgcttctgcggatgaacacaagacatgcttgagaaacacaattcaaaagatattgaatgcatcaaagatttttgggaaagaccgtgacagcacaaatgaaggtgactctgtaccccttcagtcatctacaaagaactag

SEQ ID NO: 397 - protein, 116 aa, Glycine max
MISIVAVALQPKPSDPSLIFPFLKVLARMDSNNKQTDEKRPASRDSFCQRKKSENGSFVSNLRNHFHEFIHASADEHKTCLRNTIQKILNASKIFGKDRDSTNEGDSVPLQSSTKN

SEQ ID NO: 398 - DNA, 504 bp, Glycine max
atgaggtcctacaattacaactcagtcacgaatgacgggcctaagatttggaaggtacatattagaaatggtacgaaggcaaatgctcaatacgaagagcaagctgccacagtatggcagggaaaggggtctgttgtgtgcaagactccttatagggagctgtatgtagaaagctgtattgtggagacaattgtattgtccactggagtcttggagagcatggacactcagaaaagccaacctgaaaagcagtcttcatccgctgcaactgccccatctgttacttcatgccaaaagaagaagaatgaagaagctgctttcttagacgatttgaaggatcacattgacgagtttattaaggcttctatggatgagcacaaaagttgtttcaagaaaataattcagaagatgtttggtatgtccaagactgttgcagaaggtcactccaatgcttccaaagaaattcaaagttctctgcatcttcagacaactgtacaagactag

SEQ ID NO: 399 - protein, 94 aa, Glycine max
MDTQKSQPEKQSSSAATAPSVTSCQKKKNEEAAFLDDLKDHIDEFIKASMDEHKSCFKKIIQKMFGMSKTVAEGHSNASKEIQSSLHLQTTVQD

SEQ ID NO: 400 - DNA, 285 bp, Glycine max
atggacactcagaaaagtcaacctgagaagcagtcttcatccactgcaactgccccatctgttacttcatgtcgaaagaagaagaatgaagaagctgctttcttggacgatttgaaggaccacattgatgagtttattaatgcttctatggatgaacacaaaacttgttttaagaaaacaattcagaagatgtttggtatgtccaaggctgttgcagaaggtcagtccaatgcttccaaagaagttgaaagttctctgcctcttcagacaactgtacaagactag

SEQ ID NO: 401 - protein, 94 aa, Glycine max
MDTQKSQPEKQSSSTATAPSVTSCRKKKNEEAAFLDDLKDHIDEFINASMDEHKTCFKKTIQKMFGMSKAVAEGQSNASKEVESSLPLQTTVQD

SEQ ID NO: 402 - DNA, 255 bp, Glycine max
atggattccaacaatgagaaacgaccagcatcaagagtctcattctgccaaagaaagaagtctgggaacgggagctttgtgtctaatttaagaaatcactttcatgaatttatacacgcttcttcggatgaacacaagagatgcttgagaaacacaattcaaaagatattagatgcatcaaagatttttgggaaaaatggtgacagcacaaatgaaggtgagtatgtaccccttcagtcatctacaaagaactaa

SEQ ID NO: 403 - protein, 84 aa, Glycine max
MDSNNEKRPASRVSFCQRKKSGNGSFVSNLRNHFHEFIHASSDEHKRCLRNTIQKILDASKIFGKNGDSTNEGEYVPLQSSTKN

SEQ ID NO: 404 - DNA, 216 bp, Helianthus annuus
atgatatcttcggttgataccaaatactgtacaaggaagagatctgatgaagctggttttgtggacaatgcaaaggaaaacatgaagtcttttattcatgcctcttttgatgaacacaagacatgcttcaaggcaacttggcacaagatgactgaaatattccaagaagaaaaatctgcaggactagaagcgcaaaaccctcaggcgaagaactaa

SEQ ID NO: 405 - protein, 71 aa, Helianthus annuus
MISSVDTKYCTRKRSDEAGFVDNAKENMKSFIHASFDEHKTCFKATWHKMTEIFQEEKSAGLEAQNPQAKN

SEQ ID NO: 406 - DNA, 240 bp, Helianthus annuus
  misc_feature (178)..(178): n is a, c, g, or t
  misc_feature (190)..(190): n is a, c, g, or t
atggacggaggattatacgaacactacaaggaataccgacattgtgtcaagaacactttgaacgagttagtcggggacgaactcgcaaaacacattaaacttatacactccgaggacgggtccggaatcggtgctgctcttcttgccgcctctcattccaatacatctaggtgtttgngtcccttagaangtgatcagaatcgtgatgttgtcgtatacatacgatatgttctggtctag

SEQ ID NO: 407 - protein, 79 aa, Helianthus annuus
  misc_feature (60)..(60): Xaa can be any naturally occurring amino acid
  misc_feature (64)..(64): Xaa can be any naturally occurring amino acid
MDGGLYEHYKEYRHCVKNTLNELVGDELAKHIKLIHSEDGSGIGAALLAASHSNTSRCLXPLEXDQNRDVVVYIRYVLV

SEQ ID NO: 408 - DNA, 534 bp, Helianthus annuus
atgatttctggcatgtatttgggagaacttgttcgtagagttctatgtaggatggccgatgaggctgctctttttggagatacagtaccccccaaattaaaaactcaattcatattaaggacacctgaaatgtctgcaatgcatcatgacacatcatccgatctcaagttggtagggaacatattgcaagacgtattagagatacccaatacaaccctctcaacaagaaaaatagtggttgaggtatgcaatgtcattgccacacgaggcgctcgcctagccgcggcaggaattctaggcattctaaagaaaaccggacgagacaccgttaaagacagtgaagtccccaagactgtcatcgcgatggacggaggattatacgaacactacaaggaataccgacattgtgtcaagaacactttgaacgaattagtcggggacgaactcgcaaaacacattaaacttatacactccgaggacgggtccggaatcggtgctgctcttcttgccgcctctcattcccaatacatctag

SEQ ID NO: 409 - protein, 177 aa, Helianthus annuus
MISGMYLGELVRRVLCRMADEAALFGDTVPPKLKTQFILRTPEMSAMHHDTSSDLKLVGNILQDVLEIPNTTLSTRKIVVEVCNVIATRGARLAAAGILGILKKTGRDTVKDSEVPKTVIAMDGGLYEHYKEYRHCVKNTLNELVGDELAKHIKLIHSEDGSGIGAALLAASHSQYI

SEQ ID NO: 410 - DNA, 270 bp, Helianthus annuus
aacataatctttgaaacataatgtacagctgccactaaaataacatatattaatcacctaacaggatatgaacaagagtattcaaaatataccaactccactgaaaattcagttataaacgagttatttcaccaaccaaacattattctagtagccagatctaggcacggtttgatgacatgaagcgtaaaatatccaaaactatggtatctacccgtgcgttaaaagatatactctattcagtgacaatggtttgaagaggcaatgcgc

SEQ ID NO: 411 - protein, 89 aa, Helianthus annuus
MATEKSQLPSAAPPAMDSCRKKKSDDATFLQDVKDHIDEFIHASMDEHKTCFKKSISKMFGMSKIVAERTAAESKEVESALPLQTIVTE

SEQ ID NO: 412 - DNA, 192 bp, Helianthus argophyllus
ccgtcgaacataaacgacgacactattcgattttcaaactcccgtcaaatttcaccagttccttccgtttcattgaattgctttcatcttcttcccaccaaatcgaaacgacgtcggagaagaattttactattcataccgagaggttggcgtgtaacacctgtaattacagtgtccattcacttcatgacc

SEQ ID NO: 413 - protein, 63 aa, Helianthus argophyllus
MFCGSVGDNSVSIKDATSKMTSASKQDNSQTCIVSRLVDHIEHFLNHFPHCQKRCIIILYGPR

SEQ ID NO: 414 - DNA, 243 bp, Helianthus argophyllus
atggcaacggaaaaaagtcaacaatctactccatctgcttctgtttctgctccggtggcggcatcatgtagaaggaagaaatcggaagatgcaagtttcttacaggatgtgaaagatcacattgatgagttcatacatgcttccacggatgaacataaaacatgcttccaaaagaccattctaaaggtttgtttttcaaatacagatactatactccgacaaacacaattgttcaatgattaa

SEQ ID NO: 415 - protein, 80 aa, Helianthus argophyllus
MATEKSQQSTPSASVSAPVAASCRRKKSEDASFLQDVKDHIDEFIHASTDEHKTCFQKTILKVCFSNTDTILRQTQLFND

SEQ ID NO: 416 - DNA, 204 bp, Hedyotis centranthoides
atgaagagctgcagtaagatattccttgggtttgtcaatgtgatagttttggcattcgcgattttccaaggtgtgttcgttctgatgtccaatcatgattcctccaataaacactgttacaagaactccggcccggcgattttctgtatctcggcggtggttggtgatcatttctctgttagggttactgagcacttgttgtaa

SEQ ID NO: 417 - protein, 67 aa, Hedyotis centranthoides
MKSCSKIFLGFVNVIVLAFAIFQGVFVLMSNHDSSNKHCYKNSGPAIFCISAVVGDHFSVRVTEHLL

SEQ ID NO: 418 - DNA, 267 bp, Helianthus exilis
atggcaacagaaaagagtcaacaatctactccatctgctccggtggcggcatcatgtagaaggaagaaatcagaagatgcaagtttcttacaggatgtgaaagatcacattgatgagttcatacatgcttccacggatgaacataaaacatgcttccaaaagaccattctaaagatgtttggaatgtctaaggtggttgcacaaacaagtgctgataacacgggagttgagagttcattgtccctgcaaacagttgtttctgattaa

SEQ ID NO: 419 - protein, 88 aa, Helianthus exilis
MATEKSQQSTPSAPVAASCRRKKSEDASFLQDVKDHIDEFIHASTDEHKTCFQKTILKMFGMSKVVAQTSADNTGVESSLSLQTVVSD

SEQ ID NO: 420 - DNA, 270 bp, Helianthus tuberosus
  misc_feature (225)..(225): n is a, c, g, or t
atggcaacagaaaaatcccagcttccttctgctgcacctccagccatggattcatgtagaaagaagaaatcagatgatgcaactttcttgcaagatgttaaagatcacattgatgagttcattcatgcttccatggatgaacacaaaacctgctttaagaaatccatttctaagatgtttggaatgtccaagattgttgcagagagaactgctgcagagagtaangaaagtgagagcgcgttgcctcttcaaaccattgtcactgaatag

SEQ ID NO: 421 - protein, 89 aa, Helianthus tuberosus
  misc_feature (75)..(75): Xaa can be any naturally occurring amino acid
MATEKSQLPSAAPPAMDSCRKKKSDDATFLQDVKDHIDEFIHASMDEHKTCFKKSISKMFGMSKIVAERTAAESXESESALPLQTIVTE

SEQ ID NO: 422 - DNA, 294 bp, Hordeum vulgare
atgtctggcggcgtccaatcttctgtcccccagccatcttcatcttcatctccggtaaagcccgcctcgacttcgtgccgaaagaagaactccggcaacacatcgtttgtcacgcaactgagagatcacttccacgagtttgttcatgcctccatggacgaacacaggacatgcttaactaacactgtcaagaaattgtatgcgatgtcgaaggccgccgcggagagaaccgctggggcaaaagaagctggagctgaaagcgttttgccacttgagagtgaagtgtcacggtag

SEQ ID NO: 423 - protein, 97 aa, Hordeum vulgare
MSGGVQSSVPQPSSSSSPVKPASTSCRKKNSGNTSFVTQLRDHFHEFVHASMDEHRTCLTNTVKKLYAMSKAAAERTAGAKEAGAESVLPLESEVSR

SEQ ID NO: 424 - DNA, 381 bp, Hordeum vulgare
atggatatatcacaaagaaatcttctcaaaggtttaacttctgatgagagtgtcgttgctaaggactcttccacgctaggtgtggtgattgttaagcattgcggatatacggcaatagtgaaagtttcgggacgcacaaagaacagcagcgatggcaaacaaaccagtgatatctctgatcatcttgatgaaatacctaacatcgatgtggatgatcatccagatggaggttctaatgccttgaatgctcacagtctaagaataccactgccgaaaattaccaacccagaaatcgctgccagtagccagcacttgcatcttaaaccacatgttgataattatgcgaggaaactagcatgtacggtacttgaaaccagctga

SEQ ID NO: 425 - protein, 126 aa, Hordeum vulgare
MDISQRNLLKGLTSDESVVAKDSSTLGVVIVKHCGYTAIVKVSGRTKNSSDGKQTSDISDHLDEIPNIDVDDHPDGGSNALNAHSLRIPLPKITNPEIAASSQHLHLKPHVDNYARKLACTVLETS

SEQ ID NO: 426 - DNA, 291 bp, Hordeum vulgare
atggattccagcaatacacagtctgaaggttctcagccacatgttcctaaaaaccctagcatgtcatcgtgccggaagaagaaaaccgatgatgatgctacactccttgaagatgtaaaagagcacattgacgagttcatcaatgcctccatggacgagcacaagacctgcttcaagaagaccattcagaagatgttcgggatgtcaaaggctgttgcggagcggtccgctgcagcaaaggaagctgaagtcgaaagcgccttgcctcttgagaccagtgtgtcccagtag

SEQ ID NO: 427 - protein, 96 aa, Hordeum vulgare
MDSSNTQSEGSQPHVPKNPSMSSCRKKKTDDDATLLEDVKEHIDEFINASMDEHKTCFKKTIQKMFGMSKAVAERSAAAKEAEVESALPLETSVSQ

SEQ ID NO: 428 - DNA, 291 bp, Hordeum vulgare
atggattccggtaacacgcagacagaaggttcccagccacccgttcctaaaaaccctgccatgacgtcgtgccggaagaagaagaccgatgatgatgtcaccttccttgaagatgtgaaagaacacatcgacgagttcatcaatgcatccatggatgagcacaagacctgcttcaagaagaccattcagaagatgtttgggatgtcgaaggctgtcgccgagcggtctgctgctgccaaggaagctgaagtcgaaagcgctttgccccttcagaccagtgtgtcccagtag

SEQ ID NO: 429 - protein, 96 aa, Hordeum vulgare
MDSGNTQTEGSQPPVPKNPAMTSCRKKKTDDDVTFLEDVKEHIDEFINASMDEHKTCFKKTIQKMFGMSKAVAERSAAAKEAEVESALPLQTSVSQ

SEQ ID NO: 430 - DNA, 363 bp, Hordeum vulgare
ccgcccccgcgccccggccccggcccccgcccggccccgccgccccccccccagcccccccgcaccacccccccgcccccccgccaagggacaagcaatcccccctacgcccgccaaagcgcggcgcccaaccggataagagacccgcaaccagacgggtcttccaactggacatcgccaggccaacccatgccccacttaactaagcgaacacaaggacaaagcgaaaaattagactttaggctgataagaccccataactctcagtgaatgaagcttcaggttcatcgaagacgatcacgtgctcaggacgacttcactgagactcagttgccgccggtgctgcttctggcttcgccaccg

SEQ ID NO: 431 - protein, 120 aa, Hordeum vulgare
MMEKKEGGERTEKVEVSDDGGKKPAEEETKPAPATGPVCFKKPAGEDASILETTKGYLKQLGDTNADTHWDCIKNRVRAAREYISSKTSSAFGRQKVEPEAKEETPVAKPEAAPAATESQ

SEQ ID NO: 432 - DNA, 351 bp, Helicosporidium sp.
atggccacactcggtcgcttggctcgcgaggcgtgccgggtcgctcgctctagcggcgtgggtcagctttcgcaggcttctcgtgttactagacaggtgcagcagcggggttttgcttcaggccatggagcgcacgacagtgtcacctacgagggtctcactctgcacaagccggccaagtggcactccgtggttggccacggcctcgcaggcgtcatgtggttctgggtattctaccgcttctaccacgactacgagaccttcctgtttgggcacgccgctcactttgagcacgaacttcatgccgcccatggcgaacatggcaaggagggtgagggcaagaagcattag

SEQ ID NO: 433 - protein, 116 aa, Helicosporidium sp.
MATLGRLAREACRVARSSGVGQLSQASRVTRQVQQRGFASGHGAHDSVTYEGLTLHKPAKWHSVVGHGLAGVMWFWVFYRFYHDYETFLFGHAAHFEHELHAAHGEHGKEGEGKKH

SEQ ID NO: 434 - DNA, 282 bp, Ipomoea nil
atggctactgaaggaggtaaacctgaggcacaaacctcagctgcagctgttaatatggcaacggcttcatgccggaagaagaagtctgaaagtgccacttttttagaagatgtgaaagatcatattgacgagttcatacatgcttcaatggatgaacataaaacgtgcttcaagaaaactatccagaagatgtttggaatgtcgaaagttgttgctgaaagaaatgcggaagtgaaggaggttgaaagcaaacttccactccggacagtcatatctgaatag

SEQ ID NO: 435 - protein, 93 aa, Ipomoea nil
MATEGGKPEAQTSAAAVNMATASCRKKKSESATFLEDVKDHIDEFIHASMDEHKTCFKKTIQKMFGMSKVVAERNAEVKEVESKLPLRTVISE

SEQ ID NO: 436 - DNA, 468 bp, Leymus chinensis
atgaaaggttaccttaatgatccggaggccacaaagaacaccattgacaaagacggttggctgcatactggagacattggttatgtcgatgatgacgacgagatcttcattgtcgacaggctcaaggagataatcaaatacaagggattccaagtacctcctgcggaacttgaagcccttctcattacacacgccgaaatcaaagatgctgctgtcgtatcgatgcaagatgaacttgctggtgaagttccagttgcattcattgtgcggattgaaggttctgagatcagcgagggcgagatcaagcagtttgttgcaaaagaggttgttttctacaagaggatccacaaagttttcttcgcggactcggttccgaagagtcctgccggcaagatcctcaggaaggacttgagagcaaagcttgctgcaggcatcccaggcagtggaagcacacagtccaaaagctga

SEQ ID NO: 437 - protein, 155 aa, Leymus chinensis
MKGYLNDPEATKNTIDKDGWLHTGDIGYVDDDDEIFIVDRLKEIIKYKGFQVPPAELEALLITHAEIKDAAVVSMQDELAGEVPVAFIVRIEGSEISEGEIKQFVAKEVVFYKRIHKVFFADSVPKSPAGKILRKDLRAKLAAGIPGSGSTQSKS

SEQ ID NO: 438 - DNA, 279 bp, Lotus japonicus
  misc_feature (264)..(264): n is a, c, g, or t
gggagtcagtcacaaaaatgaaaaagtgctacttagcagtgaaacataaatacatgacaaatctataatcattgtagtcaaaacttgaaaattttaaggtcataggatctatcatagacattcttattactccagtccagtcatagatccacaaaagcattctagttccttgtagatgaatgaaggggcaaagaattttcaccttggtctatgctgtcactgttttttccgaaactctttgatacattaaatatcttttgaatngtgttcctcaagcat

SEQ ID NO: 439 - protein, 92 aa, Lotus japonicus
  misc_feature (11)..(11): Xaa can be any naturally occurring amino acid
MGSKENQTDEXLPVNSAPRVSFCPRNESGNGSFVSSLRNHFHEFIHASVDEHKTCLRNTIQKIFNVSKSFGKNSDSIDQGENSLPLHSSTRN

SEQ ID NO: 440 - DNA, 276 bp, Lotus japonicus
atgagcactcagacaagccaacctgaaaagcagtcttcatcagttgccactgtcgcttcatgtcgaaagaagaagagtgaagacgccactttcttggaggatgtaaaggatcacattgacgagtttattcatgcttctatggatgaacacaaaacctgttttaagaagacaattcagaagatgtttggtttgtccaaggcaggttcagaaacgaactccaatgctgtgaaagaagttgaaagttctctgccgcttcagacaactgtacaagattaa

SEQ ID NO: 441 - protein, 91 aa, Lotus japonicus
MSTQTSQPEKQSSSVATVASCRKKKSEDATFLEDVKDHIDEFIHASMDEHKTCFKKTIQKMFGLSKAGSETNSNAVKEVESSLPLQTTVQD

SEQ ID NO: 442 - DNA, 276 bp, Lotus japonicus
atgagcactcagacaagccaacctgaaaagctgtcttcatcggttgccactgttgcttcatgtcgaaagaagaagagtgaagaagccactttcttggaggatgtaaaggatcacattgacgagtttattaatgcttctatggatgaacacaaaacctgctttaagaagacaattcagaagatgtttggtttgtccaaggcagttgcagaaaagaactccaatgctgtgaaagaagttgaaagttctctgcctcttcagacaaccgtacaagattaa

SEQ ID NO: 443 - protein, 91 aa, Lotus japonicus
MSTQTSQPEKLSSSVATVASCRKKKSEEATFLEDVKDHIDEFINASMDEHKTCFKKTIQKMFGLSKAVAEKNSNAVKEVESSLPLQTTVQD

SEQ ID NO: 444 - DNA, 249 bp, Lactuca saligna
atgtcaacagagaaagcaccagccatggattcctgcagaaagaagaagtcagatgacgccacatttcttcaggatgttaaagatcacatcgatgagtttgttcatgcttccatggatgaacacaaaacctgcttcaaaaagaccatatcaaagatgtttgggatgtcaaaagttgttgcagagagaaatgctgctgagaataaggggatcgaaagctcgttgcctcttcgaaactgtgttttccgataa

SEQ ID NO: 445 - protein, 82 aa, Lactuca saligna
MSTEKAPAMDSCRKKKSDDATFLQDVKDHIDEFVHASMDEHKTCFKKTISKMFGMSKVVAERNAAENKGIESSLPLRNCVFR

SEQ ID NO: 446 - DNA, 267 bp, Lactuca saligna
atgacatcagaaaaaagtcaaccctcagttgcttctgctccagttattacatcatgtcgaaggaaaaagtcagatgatacaactttcttggaggatgtaaaagatcacattgatgagtttataaatgcttccatggatgaacacaagacatgcttccaaaagaccatctcaaagatgtttggtatgtctaaagttgttgcagaaagaaattctaataacaaggaaattgagagttcactatccctgcaaacagttgtttctgattag

SEQ ID NO: 447 - protein, 88 aa, Lactuca saligna
MTSEKSQPSVASAPVITSCRRKKSDDTTFLEDVKDHIDEFINASMDEHKTCFQKTISKMFGMSKVVAERNSNNKEIESSLSLQTVVSD

SEQ ID NO: 448 - DNA, 249 bp, Lactuca saligna
atgtcaacagagaaagcaccagccatggattcctgcagaaagaagaagtcagatgacgccacatttcttcaggatgttaaagatcacatcgatgagtttgttcatgcttccatggatgaacacaaaacctgcttcaaaaagaccatatcaaagatgtttgggatgtcaaaagttgttgcagagagaaatgctgctgagaataaggggatcgaaagctcgttgcctcttcgaactgttgtttccgattaa

SEQ ID NO: 449 - protein, 82 aa, Lactuca saligna
MSTEKAPAMDSCRKKKSDDATFLQDVKDHIDEFVHASMDEHKTCFKKTISKMFGMSKVVAERNAAENKGIESSLPLRTVVSD

SEQ ID NO: 450 - DNA, 198 bp, Lactuca serriola
atgacgccacatttcttcaggatgattaaagatcacatcgatgagtttgttcatgcttccatggatgaacacaaaacctgcttcgacaagaccatatcaaagatgtttgggatgtcaaaagttgttgcagtgagaaatgctgctgacaataagggaattgaaagctcattgcctcttcgaactgttgtttccgattaa

SEQ ID NO: 451 - protein, 65 aa, Lactuca serriola
MTPHFFRMIKDHIDEFVHASMDEHKTCFDKTISKMFGMSKVVAVRNAADNKGIESSLPLRTVVSD

SEQ ID NO: 452 - DNA, 267 bp, Lactuca serriola
atgacaacagaaaaaagtcaaccccctgttgcttctgctccagttattacatcatgtcgaaggaaaaagtcagatgatacaactttcttggaggatgtaaaagatcacattgatgagtttataaatgcttccatggatgaacacaagacatgcttccaaaagaccatctcaaagatgtttggtatgtctaaagttgttgcagaaagaaattctaataacaaggaaattgagagttcactatccctgcaaacagttgtttctgattag

SEQ ID NO: 453 - protein, 88 aa, Lactuca serriola
MTTEKSQPPVASAPVITSCRRKKSDDTTFLEDVKDHIDEFINASMDEHKTCFQKTISKMFGMSKVVAERNSNNKEIESSLSLQTVVSD

SEQ ID NO: 454 - DNA, 303 bp, Lolium temulentum
ctacctaaggattatgcttattgacactgaaaacattttttgctacagaggacaccattgcatcacgtttctaatgtgacacttcagtcttaagtgacaaaacgctttcagctccagcttcttttgcttcgttgcttctctctgcaacagcctttgacatcgcaaacattttcttgacagtgtttgttatacatgtcctgtggtcatccatagaggcgtgaacgaactcgtggaagtgatctctcagttccgtgacaaacgaggtgctgccagagttcttttttcggcacgaagtcgaggcag

SEQ ID NO: 455 - protein, 100 aa, Lolium temulentum
MQFPTMSGGTQSEGSQPSAAPVKPASTSCRKKNSGSTSFVTELRDHFHEFVHASMDDHRTCITNTVKKMFAMSKAVAERSNEAKEAGAESVLSLKTEVSH

SEQ ID NO: 456 - DNA, 195 bp, Linum usitatissimum
atggctatatggcaactttcgtgccaaagtatgcactcgatgacatcggttccggatcccatgtccatgtcagcttgtcgcagaatggagagaacgtattcatgggaactgaaacttcatcctctcagcatggaatctccaaagttgggagggagttcatgtcaggagttctccaccaccttccttcagttctag

SEQ ID NO: 457 - protein, 64 aa, Linum usitatissimum
MAIWQLSCQSMHSMTSVPDPMSMSACRRMERTYSWELKLHPLSMESPKLGGSSCQEFSTTFLQF

SEQ ID NO: 458 - DNA, 468 bp, Linum usitatissimum
atgatgtactacggctgcttcctcgactttggacctgacctgcccgcttggtcccccgacccggaaaatgcaatcatgactaatgtgggtcagctcttagagagacgaggggaggagtttctggaatcaaagtacaaggatcccgtttcaagttttgctgactttcaggagttctcagtctcaaacccggaagtttactggaagactgtgtttgatgaaatggaaattatgttctcagttcctccggaatgtattctacgtgaggattcgtctcatgagagccccacggtaaaccccggcggtgaatggcttcctggagcgaatctcaatcctgcgaaaagttgtctgagttgcaataggaagagaactttggatgatgtagtgttgagatggcgtgacgaaggaaatgatgatatccctgtgtgcagcatggacactttgaggagttgcgtcaagaagtctggttag

SEQ ID NO: 459 - protein, 155 aa, Linum usitatissimum
MMYYGCFLDFGPDLPAWSPDPENAIMTNVGQLLERRGEEFLESKYKDPVSSFADFQEFSVSNPEVYWKTVFDEMEIMFSVPPECILREDSSHESPTVNPGGEWLPGANLNPAKSCLSCNRKRTLDDVVLRWRDEGNDDIPVCSMDTLRSCVKKSG

SEQ ID NO: 460 - DNA, 195 bp, Linum usitatissimum
atggctatatggcaactttcgtgccaaagtatgcactcgatgacatcggttccggatcccatgtccatgtcagcttgtcgcagaatggagagaacgtattcatgggaactgaaacttcatcctctcagcatggaatctccaaagttggtagggagttcatgtcaggagttctccaccaccttccttcagttctag

SEQ ID NO: 461 - protein, 64 aa, Linum usitatissimum
MAIWQLSCQSMHSMTSVPDPMSMSACRRMERTYSWELKLHPLSMESPKLVGSSCQEFSTTFLQF

SEQ ID NO: 462 - DNA, 276 bp, Linum usitatissimum
atggaggcatcaaaagggtcagaggaaaagcagcaacaggagcaaccaaagccagtagaatcatgccgcaagtacaagaaggacgacgccagttttctggaagacgtgaaagatcacatcgacgagttcatcaacgcatcgatggacgagcacaagtcttgctttaagaaaaccatcaataagatgtttagcatgacgaggattgttgagaagaagcaagccgaagctgaaggcgtcgaaagtgttctcccccttcaaactagcgtgtctaaatga

SEQ ID NO: 463 - protein, 91 aa, Linum usitatissimum
MEASKGSEEKQQQEQPKPVESCRKYKKDDASFLEDVKDHIDEFINASMDEHKSCFKKTINKMFSMTRIVEKKQAEAEGVESVLPLQTSVSK

SEQ ID NO: 464 - DNA, 249 bp, Lactuca virosa
atgacaacagagaaggcaccagccatggattcctgcagaaagaagaagtcagatgacgccacatttcttcaggatgtaaaagatcacatcgatgagtttgtacacgcttccatggatgaacacaaaacctgcttcaagaagaccatatccaagatgtttgggatgtcaaaagttgttgcagagagaaatgctgctgagaataagggaattgaaagctcattgcctcttcgaactgttgtttccgattaa

SEQ ID NO: 465 - protein, 82 aa, Lactuca virosa
MTTEKAPAMDSCRKKKSDDATFLQDVKDHIDEFVHASMDEHKTCFKKTISKMFGMSKVVAERNAAENKGIESSLPLRTVVSD

SEQ ID NO: 466 - DNA, 267 bp, Lactuca virosa
atgacaacagaaaaaagtcagccccctgttgcttctgctccagttattacgtcatgtcgaaggaaaaagtcagatgatacaactttcttggaggatgtaaaagatcacattgatgagtttataaatgcttccatggatgaacacaagacatgcttccaaaagaccatctcaaagatgtttggtatgtctaaagttgttgcagaaagaaattctaataacaaggaagttgagagttcactatccctgcaaacagttgtttctgattag

SEQ ID NO: 467 - protein, 88 aa, Lactuca virosa
MTTEKSQPPVASAPVITSCRRKKSDDTTFLEDVKDHIDEFINASMDEHKTCFQKTISKMFGMSKVVAERNSNNKEVESSLSLQTVVSD

SEQ ID NO: 468 - DNA, 285 bp, Musa acuminata
atgatggagtcagccaagggtcgatcggaggtggagttccccggccgtgccgtctcgccttgttggaagaagaaggcgcccgacgccggcttcttggccaacgtcaaggaccacttggaccagttcgtcagcacgcccatggatcagcataggatttgtctcaagaagacgatcagaggggtaggtgacctcgtcaagcttaggaagcaaagcaaggaagcaaggcaagctattgcgtcgtcggattccgcttccaaagacggagacgtggatacgtcgaggtag

SEQ ID NO: 469 - protein, 94 aa, Musa acuminata
MMESAKGRSEVEFPGRAVSPCWKKKAPDAGFLANVKDHLDQFVSTPMDQHRICLKKTIRGVGDLVKLRKQSKEARQAIASSDSASKDGDVDTSR

SEQ ID NO: 470 - DNA, 273 bp, Musa acuminata
atggaagcacaaaaacctcaatccgaaaagctgcggtcagttgatcaagccatggcctcatgccgaaagaagaaatcggaggaagctagctttttggaggatctgagagaccatatggacgaattcattaatgcctctatggatgagcacaaatcttgctttaaaaagactatccaaaagatgtttggaatgtcaaagagtgttgcacagaggacttcagaaaccaaagaagtggaaagttctgtgccacttgagaccaccgtggttcagtga

SEQ ID NO: 471 - protein, 90 aa, Musa acuminata
MEAQKPQSEKLRSVDQAMASCRKKKSEEASFLEDLRDHMDEFINASMDEHKSCFKKTIQKMFGMSKSVAQRTSETKEVESSVPLETTVVQ

SEQ ID NO: 472 - DNA, 537 bp, Mesembryanthemum crystallinum
atgtgggcttccactaccccaaccacaatcacacccttcttcgtctcaatccccaaacttccaccaccatcacacaagttcaccaccacccaaaacgccgccacactacggcgtagccaccaggtctccgtcacttccgacgacgtcagtgggctgggcctagcagtcctcggctccctccgctccggcccacaaacaacaacaacaaccaacaataacgcgggttcgggttcgggttcaagtaccccgaagcagaaggtcaaacacaaacgagatgaaccgaagaaagaggaaaaggggaaagagatgagcgggtcggatatcttgcgggctttgcagaaggccaccgcccgaaaagcccagattagcaccaacaagaggaagcagcagcagaagatgaatctgaataggagagagaatccgaatgtgaatcgggttgttgattacgataaggtccgacccattaccatcaagagcgattggactacccgattggacgacttgcagaaacgtctcgatgagttcttaagcttgtga

SEQ ID NO: 473 - protein, 178 aa, Mesembryanthemum crystallinum
MWASTTPTTITPFFVSIPKLPPPSHKFTTTQNAATLRRSHQVSVTSDDVSGLGLAVLGSLRSGPQTTTTTNNNAGSGSGSSTPKQKVKHKRDEPKKEEKGKEMSGSDILRALQKATARKAQISTNKRKQQQKMNLNRRENPNVNRVVDYDKVRPITIKSDWTTRLDDLQKRLDEFLSL

SEQ ID NO: 474 - DNA, 420 bp, Mesembryanthemum crystallinum
tgtatgatcatcttcaagcaatggagggctctgatctctccctctccaaccccaactcatctccggcgagctccccggcgagtcggccgccgacccggccacccctctctctccattgtaaatgacatttttgtccctaggagcaattgcaatagggggtgacttttgtgcatccttagcaatacttttgttattattaacttcatttcttttggttagttgaagagtggcttgaagatggcatttatgtaattttgctgccagagtggaagaaagaagcttagaagaagatgattgggacccactgttggggaagttggttctagccctgggcccacacatgagccttgcagcttcatcatatgctcttgctgcatcctctgccgtttcgaacgtccctagccaaatacgcgttttcaa

SEQ ID NO: 475 - protein, 139 aa, Mesembryanthemum crystallinum
MCGPRARTNFPNSGSQSSSSKLLSSTLAAKLHKCHLQATLQLTKRNEVNNNKSIAKDAQKSPPIAIAPRDKNVIYNGERGVAGSAADSPGSSPEMSWGWRGRDQSPPLLEDDHTHIEQMIEELLDYGYFELCNTTHTNS

SEQ ID NO: 476 - DNA, 276 bp, Malus x domestica
ttccagcaccaacaacaattccagccgttccagccctcccgacgacacggaggacagggacaacaacaacagcaaagcgaggagaaccaagaccgccaccagaaggtccgacacatcagagagggtgatatcatcgccttgcccgccggtgtcgcttactggagctacaacaacggcaaccaggatctcgttgctatctccctccttgacttcagcaacgagcagaaccagctcgaccaacagcctaggagattttatctagctggcaacccacaa

SEQ ID NO: 477 - protein, 91 aa, Malus x domestica
MESQKTQHEPSPAAANPAATSCRKKKNEQATFLEDLKDHIDDFVNASMDEHKTCFKKTMNKMFGMSKIVSKRSADTKEVESTLPLQTTVAK

SEQ ID NO: 478 - DNA, 486 bp, Manihot esculenta
atggtcctctcagtcctcttatgtgccttgatttgctcacttggattgaattccattattaggtgtgcattaaggtgctctaacttagtagcttctgagtctgctagcaattccacaactcaattagccaatacaggagtcaagcgaaaagcattaaagactttcccaacagtaaactactcaactgacatgaagctgccttgtctggacacagagtgtgcgatatgtctttcagatttcacacctggtgagcgtgtgcgtcttttgcccaagtgcaaccatggatttcatgtccggtgcatcgacaagtggctcagttcacactcgtcctgccctacttgcagacactgccttattgagacatgccaaaagattgttggttgcagccaatctacctcatcagaacctccaccagtgcaagaaagtattgtgaacatagcaccactagaacctgaaggtttgatacgcaattacagagttagctaa

SEQ ID NO: 479 - protein, 161 aa, Manihot esculenta
MVLSVLLCALICSLGLNSIIRCALRCSNLVASESASNSTTQLANTGVKRKALKTFPTVNYSTDMKLPCLDTECAICLSDFTPGERVRLLPKCNHGFHVRCIDKWLSSHSSCPTCRHCLIETCQKIVGCSQSTSSEPPPVQESIVNIAPLEPEGLIRNYRVS

SEQ ID NO: 480 - DNA, 210 bp, Mentha piperita
gcctaatgcggattctagtccactccggattcttcgacaaggtcaaggtcaaggtcaaggtcgagggcgaggacgaagaagaagaggaagatgcttattccctaactccagcttcgcgcctcttgttgaggagcgagcccttgagcgtggcgcctttcgcgctcgccatgtcggaccccgtctacacggagacatggcaccatctgagcg

SEQ ID NO: 481 - protein, 69 aa, Mentha piperita
MSSRIWYRTQPQHRCGTIRSDGAMSPCRRGPTWRARKAPRSRARSSTRGAKLELGNKHLPLLLRPRPRP

SEQ ID NO: 482 - DNA, 303 bp, Marchantia polymorpha
atgagcagcgattcgggaaatcgcagagctgaggcggaagctgagcgtggaccgcctttgcagcctcagcagtcgtcatgtcggaagaagaaggccgacgtgaacgagggatttgtcaaggatgtgatggatcacatcaacgagtttgtgaacgcgtcgtatgatgagcacaagacttgtctgacgaagaccgtccgtaagctctttggcggaatgtcgaaactagggcaaaatccaccagcttcagcacctgcccccgttgtcagcgtcttaccactgcgagccaatatctcctccgattga

SEQ ID NO: 483 - protein, 100 aa, Marchantia polymorpha
MSSDSGNRRAEAEAERGPPLQPQQSSCRKKKADVNEGFVKDVMDHINEFVNASYDEHKTCLTKTVRKLFGGMSKLGQNPPASAPAPVVSVLPLRANISSD

SEQ ID NO: 484 - DNA, 375 bp, Malus sieboldii
atgttgccagaaatacccttctgcaaccccccaaaaaatccccatcttcatcactgtcgttcaaaacaacattatttttcaccgagttatgtgggctcttttggagtttttgttgtcttggtcagagttttcacagagaaaacaggaaagcaagaaacttctcctcccttcccaccccctctctctccttttattttcttccttgtctttcttgtttctctctctctccacctctccccttctttattatttcctccccaactctctcttccttttccttacccatctcctcctgcccctctttctatctcttctccctgtaattcttggtttttgggttctgggttgctttacttttatctccctgtgatctga

SEQ ID NO: 485 - protein, 124 aa, Malus sieboldii
MLPEIPFCNPPKNPHLHHCRSKQHYFSPSYVGSFGVFVVLVRVFTEKTGKQETSPPFPPPLSPFIFFLVFLVSLSLHLSPSLLFPPQLSLPFPYPSPPAPLSISSPCNSWFLGSGLLYFYLPVI

SEQ ID NO: 486 - DNA, 276 bp, Medicago truncatula
atggacactcagaaaaaccaagctgaaaagccaacttcatcagctgctgttgccacttcttgtcgaaagaagaagcatgaagaagcctcattcttggaggatgtgaaggatcacattgacgagtttattaatgcttctatggatgaacacaaaacctgctttcagaaaacaattaagaagatgtttggtttgtccaaggtagtggctgaagcgaattccaaggctacaaaagaagttgaaagttctttgcctcttcagacagttttaaaagagtaa

SEQ ID NO: 487 - protein, 91 aa, Medicago truncatula
MDTQKNQAEKPTSSAAVATSCRKKKHEEASFLEDVKDHIDEFINASMDEHKTCFQKTIKKMFGLSKVVAEANSKATKEVESSLPLQTVLKE

SEQ ID NO: 488 - DNA, 258 bp, Nuphar advena
atggcatcagaacaagcccagtcatctactagtgctcctacttcatgtaggaggaagaagtcagaggatgccacctttctggctgatttaagggatcatattgatgaatttatccatgcttctatggatgagcataagacatgtttccagaagaccattcaaaagatgtttcgaatgtcaaaagctgtgtcagagaaacattcggagtctaatggagttgaaagtgtactgcctctccaaacaacagtctccaaatag

SEQ ID NO: 489 - protein, 85 aa, Nuphar advena
MASEQAQSSTSAPTSCRRKKSEDATFLADLRDHIDEFIHASMDEHKTCFQKTIQKMFRMSKAVSEKHSESNGVESVLPLQTTVSK

SEQ ID NO: 490 - DNA, 357 bp, Nicotiana benthamiana
aagatagaatgcacgatatcgtgaagaacgaggttgaaagcgcaggggaagctacgtggaaagagatgatgatgcggatcttcactaaaatggatgaagaagtcgttgagtattcgagaggaggcggtggtgcaccaaccgctgattgtagatgtgaacttcagacgccgcagtgtgatgcagttggatccactgctgtcgtagcggtggtaactccaaacgaaatcgttgtgtccaattgcggtgactctcgcgctgtgctttgcagaaatggcgttgctattcctctttccactgatcataagccggatcgacccgatgaactcagtcggattgaagaagctggcggtcgtgtta

SEQ ID NO: 491 - protein, 118 aa, Nicotiana benthamiana
MISGKRNSNAISAKHSARVTAIGHNDFVWSYHRYDSSGSNCITLRRLKFTSTISGWCTTASSRILNDFFIHFSEDPHHHLFPRSFPCAFNLVLHDIVHSIFTFHRSLYKIIIEKRTSS

SEQ ID NO: 492 - DNA, 189 bp, Nelumbo nucifera
atgaccggaggcccgtattgcaggcctaaacattggaagcgaaacacggcaatcgccatgttcggcgtctttctcatctgcattcccatcgccatgaaatccgctgagctcgagcaacgtccgcatcatcctgtccgtccaattccttcgcagctctggtgcaagaattttggaaataaggaatattag

SEQ ID NO: 493 - protein, 62 aa, Nelumbo nucifera
MTGGPYCRPKHWKRNTAIAMFGVFLICIPIAMKSAELEQRPHHPVRPIPSQLWCKNFGNKEY

SEQ ID NO: 494 - DNA, 282 bp, Nicotiana sylvestris
atggctgatgactatggtgttttaaggaataaaactgatcatgtatcgaacagtgttaattacagtgttggtgaacattatattgaacctgtctatggagatgatgttgatgattatgaggatgactgtgatgaagaggatgaggaagatggattggccgatgaaaatgtccaaagatactttgatgccgggtccgaggaagaagggaatagatttatggatggagaacttgttgaaaacctaaataaagattcagaatcatcatccgagtatagtgattga

SEQ ID NO: 495 - protein, 93 aa, Nicotiana sylvestris
MADDYGVLRNKTDHVSNSVNYSVGEHYIEPVYGDDVDDYEDDCDEEDEEDGLADENVQRYFDAGSEEEGNRFMDGELVENLNKDSESSSEYSD

SEQ ID NO: 496 - DNA, 264 bp, Nicotiana tabacum
atgtcaaccgagaagattccagcgcaaacagcacctgctgttgcatcatcatgccgaaaaaagaagtctgaaagtgccacgtttttggaggatgtaaaggatcacattgatgaatttataaatgcctcaatggatgaacacaagacttgtttcaagaagaccatccagaagatgtttgggatgtctaaaattgttgctgaaagaaatgctgaagcaaaggaggttgagagctcacttcctctccgaactgttgtatctgagtaa

SEQ ID NO: 497 - protein, 87 aa, Nicotiana tabacum
MSTEKIPAQTAPAVASSCRKKKSESATFLEDVKDHIDEFINASMDEHKTCFKKTIQKMFGMSKIVAERNAEAKEVESSLPLRTVVSE

SEQ ID NO: 498 - DNA, 282 bp, Nicotiana tabacum
atggcagcagaaaatgtccaaaatgagaagacaccatcccctgtttctccaaatccagccatgacttcatgtagaaagaagaagaacgaagaagcgacttttctggaagatatcaaggatcacattgatgaattcatccatgcttccatggatgaacataaaacctgcttcaagaagaccatccaaaagatgttcggcatgtcaaaagttgttgcagagaggaatgccaaggctaaagaggttgaaagttctctgcccctgcaaacaacattgaccgagtag

SEQ ID NO: 499 - protein, 93 aa, Nicotiana tabacum
MAAENVQNEKTPSPVSPNPAMTSCRKKKNEEATFLEDIKDHIDEFIHASMDEHKTCFKKTIQKMFGMSKVVAERNAKAKEVESSLPLQTTLTE

SEQ ID NO: 500 - DNA, 435 bp, Nicotiana tabacum
atggatggtgagttactttcagatcctagtgaatataggagcatggttggtgctcttcaatatttgactatgactcatccggatattgcctatgctgtaaatgttgtctctcaatttatgcatgctccccgtaccactcacatgcattgtgtcaagcgtactttcaggtacttgcagggtactctgacttatggtctaactttgcgtgccctatctctgactttcatggttattgcctactcggatgccgattgggctggttgtccagatagtcgccgttctacttcaggtattgctatgtttctaggatctaatcttatctcttggcgtgcaaagaagcagccaacagtttcaaaatcgtctacagaggtcgagtatcgggctattgcatacactgttgctgagacttgttggattctgtcacattctttgtga

SEQ ID NO: 501 - protein, 144 aa, Nicotiana tabacum
MDGELLSDPSEYRSMVGALQYLTMTHPDIAYAVNVVSQFMHAPRTTHMHCVKRTFRYLQGTLTYGLTLRALSLTFMVIAYSDADWAGCPDSRRSTSGIAMFLGSNLISWRAKKQPTVSKSSTEVEYRAIAYTVAETCWILSHSL

SEQ ID NO: 502 - DNA, 285 bp, Nicotiana langsdorffii x sanderae
atgcttgtacccgctgttcctgatacctctctttgccgccagaagtactccgatgattgcgaagctgctattaatgaacagatcaatgtggaatacaataattcatatgtttatcatgcgatgtttgcctatttcgatcgagacaacgttgctctcaagggtctcgccaagtttttcaaggaatcaagtctagaggaaagacagcacgctgagaaattgatggaattccagaacaagcgcggtggggagggtgaagctgctatctatctgtgcgccacctactga

SEQ ID NO: 503 - protein, 94 aa, Nicotiana langsdorffii x sanderae
MLVPAVPDTSLCRQKYSDDCEAAINEQINVEYNNSYVYHAMFAYFDRDNVALKGLAKFFKESSLEERQHAEKLMEFQNKRGGEGEAAIYLCATY

SEQ ID NO: 504 - DNA, 360 bp, Oryza glaberrima
ttaagaggaggagaccattgtcttatctccctggatctcagcaggcacttggcacctgccttgaggtcggtcagttcggattagatgaagagatcgacaggctaaagcgtgacaagaacatcttactcgcggaggttgtgaaactaaggcacaagcagcaaagcacgaaagccaatatgcgagccatggaagagaggctgcaacatgcggagcagaagcaggtccagatgatgggtttcttggcaagagcaatgcagaaccctgacttctttcaccagttgattcaccagcaggataaaatgaaggggctcgaggacacattctcgaagaagaggacgaggtcgatagacatagtgccat

SEQ ID NO: 505 - protein, 119 aa, Oryza glaberrima
MALCLSTSSSSSRMCPRAPSFYPAGESTGERSQGSALLLPRNPSSGPASAPHVAASLPWLAYWLSCFAACALVSQPPRVRCSCHALACRSLHLIRTDRPQGRCQVPAEIQGDKTMVSSS

SEQ ID NO: 506 - DNA, 309 bp, Oryza sativa
atggaggagaagggtgcggaggcgatgacgcagaaggcgccggagaaggaggcggcggcgatggcgtgctaccggaggacggtgggggaggaggcgacgttcaaggagagatccaaggacctgttccggcagttcaaggacgcgccggcgggggatcactgggtctgcctcaagaacaaggtccgcgccgccggcgagtacgccaccctccgtactcgccagggcatcaccatgttcggcgagccaaatgtcggcgacctcttgggaagaaccaaggatgacgactccaagaagacgccttccgcgtaa

SEQ ID NO: 507 - protein, 102 aa, Oryza sativa
MEEKGAEAMTQKAPEKEAAAMACYRRTVGEEATFKERSKDLFRQFKDAPAGDHWVCLKNKVRAAGEYATLRTRQGITMFGEPNVGDLLGRTKDDDSKKTPSA

SEQ ID NO: 508 - DNA, 339 bp, Oryza sativa
atggagaaagagggcggagtgaaggcggcggcggaggcggaggcggaggcggagggggagatcgtggcggcgccggcggagaaggtggcgtgcttcaagaagacggcgggggaggaggcggacgcgacgttcatggagcgcgtcaaggactactataaccagctcaaggagagctccgccgagaagcactggatctgcatcaaggacaagttccgcgccgccggcgagtacgtctcacagaagagcagctcggtgttcggcaagaagaaggtcgagcccgtggtcaaggatgctgcagttccaggggaggcgagttcggtgacagtcgagtctcagtga

SEQ ID NO: 509 - protein, 112 aa, Oryza sativa
MEKEGGVKAAAEAEAEAEGEIVAAPAEKVACFKKTAGEEADATFMERVKDYYNQLKESSAEKHWICIKDKFRAAGEYVSQKSSSVFGKKKVEPVVKDAAVPGEASSVTVESQ

SEQ ID NO: 510 - DNA, 321 bp, Secale cereale
  misc_feature (120)..(120): n is a, c, g, or t
  misc_feature (234)..(234): n is a, c, g, or t
atgaaaggggtgcagtcggtggagatcaaccggaagcagtacaaggtgacggtgcagggattcgtggagccgcacaaggtggtgaagcgggtgcaggccaccgggaagaaggcagagatntggccatacatcccctacaacctggtggcgcacccctacgccgcgcagacctacgacaagaaggcgcccccgggctacgtgcgcaaggtggacgccgtcatgcccgtcgccagntacggcggccccggcgccggcgcgcaggaggagcggctcaccaccatgttcagcgacgacaaccccaacgcctgctccgtcatgtga

SEQ ID NO: 511 - protein, 106 aa, Secale cereale
  misc_feature (40)..(40): Xaa can be any naturally occurring amino acid
  misc_feature (78)..(78): Xaa can be any naturally occurring amino acid
MKGVQSVEINRKQYKVTVQGFVEPHKVVKRVQATGKKAEXWPYIPYNLVAHPYAAQTYDKKAPPGYVRKVDAVMPVAXYGGPGAGAQEERLTTMFSDDNPNACSVM

SEQ ID NO: 512 - DNA, 285 bp, Oryza sativa
atggaatccagcaagacacaatctcaaggttctgcctctgttccaaagaacccagccatgtcctcttgtcggaagaagaagtctgacgacgttacgttcctcgaagatctgaaagaccatatcgacgagttcatccacgcctccatggatgagcacaagcattgcttcaaaaacaccatccagaagatgtttgggatgtcaaaggttgtcgcagagcgttccgctgaagcaaaagaagctgaagtcgagagcgctttgcctcttcagaccagtgtctcgcagtag

SEQ ID NO: 513 - protein, 94 aa, Oryza sativa
MESSKTQSQGSASVPKNPAMSSCRKKKSDDVTFLEDLKDHIDEFIHASMDEHKHCFKNTIQKMFGMSKVVAERSAEAKEAEVESALPLQTSVSQ

SEQ ID NO: 514 - DNA, 294 bp, Oryza sativa
atgtcgatgcctggtgatgcccaacctgaaggttctcaccaatccgcttcctccgcaaaacctgccttgtcatcgtgccggaggaataaatctgagaacacgtcatttgtctcagatttgagagatcacatccaggagtttatccatgcttccccgaatgagcacaggacctgttttaccaagactatcaagagaatgtttggcatgtcaaaggtcgttgcagagagatccaccgaagcaaaggaacctggagctgaaagtgttttgccacttcagaccacggtgtcgcggtag

SEQ ID NO: 515 - protein, 97 aa, Oryza sativa
MSMPGDAQPEGSHQSASSAKPALSSCRRNKSENTSFVSDLRDHIQEFIHASPNEHRTCFTKTIKRMFGMSKVVAERSTEAKEPGAESVLPLQTTVSR

SEQ ID NO: 516 - DNA, 159 bp, Persea americana
atgatgattgatgagattgacagctttgatcatgcatcaatggatcaaaacacaatggggcaaattggatggatgtgctatacagtttttgcaagtataccgttcgatgacaggttcaaggttggaaatgcttcacaaggtttccaggggtgcatctag

SEQ ID NO: 517 - protein, 52 aa, Persea americana
MMIDEIDSFDHASMDQNTMGQIGWMCYTVFASIPFDDRFKVGNASQGFQGCI

SEQ ID NO: 518 - DNA, 309 bp, Prunus armeniaca
atccagcctcacatttctccgaacacatggcagccactctctcggtccggcccaaccgcctctccgccggttcatccttccctcggccaccggttcgacggccagttccggcccgcctccgaaaacccgacgtgcaattcgagccctggagaggctctatcgtcccctccaaccgcacattagcctgggccgccactcttgtccaagccggctccagagccgatgactcggcgccgttcgagatgtcggtggagaacgccctgaagctcctcggcgtatcagacggcgcgtcgttcgatgaaattcttc

SEQ ID NO: 519 - protein, 102 aa, Prunus armeniaca
MLLYLKYRETTNCKKIINSLTTAAGEWMPRNGTMSTCRKFSTAEPTTAPATSPPMVMIVAFPNLIFFLVMKYKEAPKLPARISPGTSAPPYGPTEELEAPLT

SEQ ID NO: 520 - DNA, 615 bp, Petunia axillaris
atgagtacttctaatgcatcaacatcaggagtaaggaaaggtgcatggaccgaggaagaagatcttttattgagagaatgcattgagaagtatggagaagggaagtggcatctagttccggttagagctggtctgaatagatgcaggaaaagttgcagacttaggaggttgaattatctaaggccacatataaaaagaggggacttctctttggatgaagtagagcttattttgaggcttcataagcttctaggcaacaaatggtcactcatagctggtagacttccgggaagaactgcaaacaatgtcaaaaactattggaacacgcaccttcgaaagaagttaattgctcctcatgatcagaaacaagagagcaagagcaaagccatgaaaattaccgagaacaacataataaaacctcgtcctcggaccttctcaaggccggcaatgaatcatgtttcttgttggaacggcaaaagttgtaataaaaacactatagacaagaatgaaggtgacacagaaataataaagtttactgatgagaagcaaaaaccggaagaatcgatagatgatggaacttcaatggtgagccaatttattagccaacaacattga

SEQ ID NO: 521 - protein, 204 aa, Petunia axillaris
MSTSNASTSGVRKGAWTEEEDLLLRECIEKYGEGKWHLVPVRAGLNRCRKSCRLRRLNYLRPHIKRGDFSLDEVELILRLHKLLGNKWSLIAGRLPGRTANNVKNYWNTHLRKKLIAPHDQKQESKSKAMKITENNIIKPRPRTFSRPAMNHVSCWNGKSCNKNTIDKNEGDTEIIKFTDEKQKPEESIDDGTSMVSQFISQQH

SEQ ID NO: 522 - DNA, 447 bp, Populus x canadensis
acttggcagaggcaaaatttcgatggctctgcttctcttaacatcttctttttgcgtagagattatcactgccatagataccatcacatcaacgcaattcctgaaggatccagaggctatagtctctaatggaagtatatacactctgggatttttcagcccagttaattccaccgatcgatatgtaggaatttggtttaatgaagttcctgtagtgacagccatatgggtagctaatagaaacaaacctctaaatgactcatctgggattctggccatatccaaagatgggaatcttgtagttttgaataggcagcaagagattctttggtcaagtaatgtgtcgaattttgtttcaaactcaagtgcacagctctccgacacaggaaaccttgttttgcgagataacaacaacgaagaaatcatgtgggagagcttccaacatcc

SEQ ID NO: 523 - protein, 148 aa, Populus x canadensis
MISSLLLSRKTRFPVSESCALEFETKFDTLLDQRISCCLFKTTRFPSLDMARIPDESFRGLFLLATHMAVTTGTSLNQIPTYRSVELTGLKNPRVYILPLETIASGSFRNCVDVMVSMAVIISTQKEDVKRSRAIEILPLPSPIISNR

SEQ ID NO: 524 - DNA, 165 bp, Prunus cerasus
cccctggtgtggcacccccattcttgtgaccagcccagttggtgaaacagtgtctcagttgataagtgaggccatatttggtatggaggaggcggttaggtgttgccatgattgcttatctgcactttcgacagctgcttctgcagggattcgccatggagacat

SEQ ID NO: 525 - protein, 54 aa, Prunus cerasus
MKVHCRAVPIFKYSTSPTDKNKIRLPHSRSDTNHVLWPDVSMANPCRSSCRKCR

SEQ ID NO: 526 - DNA, 276 bp, Phaseolus coccineus
atggatactacgaaagggaacactgaaaaaccgtcttcattagctgcaagtgttacttcatgtcgaaagaagaagagtgaagaagccacttttttggaggacgtgaaagatcacattgacgagtttattcatgcttctatggatgaacataaaacttgcttcaagaaaacagttcagaagatgtttggtatgtccaaggctgttgcagaaaggaacactgacactgccaaagaagttgagagttctctgcctcttcagacaactttgcaaggttaa

SEQ ID NO: 527 - protein, 91 aa, Phaseolus coccineus
MDTTKGNTEKPSSLAASVTSCRKKKSEEATFLEDVKDHIDEFIHASMDEHKTCFKKTVQKMFGMSKAVAERNTDTAKEVESSLPLQTTLQG

SEQ ID NO: 528 - DNA, 399 bp, Prunus dulcis
  misc_feature (239)..(239): n is a, c, g, or t
atgggtgtcaagaagaaaattggcaccatgcttccttatgttcgttgtccattccggaggtcaatcaacaaaggacttgggtctgggagatatcttctagaaagcaatgatttttttgcactgagagacctcattgatctttcaaaaggagcctttgcagtgctccctgtgatagttgacactgtctcaaggaaaattctgggccatataactgagcagtgtctcatatgctgtgatgngggagtcccctgtggtgcacgacaagcatgcaatgacccttcatctctcattttcccttttcaagaagatgagattgaaaggtgtccatcttgtgaatcactattccacaagcattgcttcaaaaagctcatggactgcatgtgcggggcacatccttag

SEQ ID NO: 529 - protein, 132 aa, Prunus dulcis
  misc_feature (80)..(80): Xaa can be any naturally occurring amino acid
MGVKKKIGTMLPYVRCPFRRSINKGLGSGRYLLESNDFFALRDLIDLSKGAFAVLPVIVDTVSRKILGHITEQCLICCDXGVPCGARQACNDPSSLIFPFQEDEIERCPSCESLFHKHCFKKLMDCMCGAHP

SEQ ID NO: 530 - DNA, 282 bp, Prunus dulcis
atggaatcacagaaaagtcaacatgaacaacagccatcgcctgctgctgcaaccccctccaccacttcgtgtcgaaagaagaagagcgaacaagccagtttcttggaggatgtgaaggatcatattgatgactttatccatgcctctatggatgaacacaaaacttgcttcaagaagaccatgcagaagatgtttggcatgtcaaagattgtcgctgaaaggagttccaacaccaaggaagttgaaagttctctgccccttcaaaccacagtggcaaaatag

SEQ ID NO: 531 - protein, 93 aa, Prunus dulcis
MESQKSQHEQQPSPAAATPSTTSCRKKKSEQASFLEDVKDHIDDFIHASMDEHKTCFKKTMQKMFGMSKIVAERSSNTKEVESSLPLQTTVAK

SEQ ID NO: 532 - DNA, 252 bp, Phalaenopsis equestris
atggaatcaccaaaatcgggatcggattcagagtcgccgtgctggaaaaagaaatcggcggaggaagggctgctcgccggtgtgaaggatcacgtcgatcaattcgttcatacctcagtggagcagcatcggatctgcctcaagaagaccatcagcggcctttccgagttcgtcaaacgccgcaaatcacggactattaatcgatcgtcggtgatgaacgagacgaggattgaaccgccggttgaattctag

SEQ ID NO: 533 - protein, 83 aa, Phalaenopsis equestris
MESPKSGSDSESPCWKKKSAEEGLLAGVKDHVDQFVHTSVEQHRICLKKTISGLSEFVKRRKSRTINRSSVMNETRIEPPVEF

SEQ ID NO: 534 - DNA, 282 bp, Populus euphratica
atggaaacacaaaaaagtcaaccagcaaaacagcagtcatctgcagccctggatccggccatcacttcatgccgaaggaagaagaaggatgatgccacttttttggaggatctgaacgatcacatcgatgagttcattcatgcatctatggatgagcacaaggattgttttacgaagactatcaacaagatgtttggaatgtcaaagattgttgcagagaggagtggtgatgctaaggaagtcgaaagttctttgcctctccaaactacagtggcaaagtag

SEQ ID NO: 535 - protein, 93 aa, Populus euphratica
METQKSQPAKQQSSAALDPAITSCRRKKKDDATFLEDLNDHIDEFIHASMDEHKDCFTKTINKMFGMSKIVAERSGDAKEVESSLPLQTTVAK

SEQ ID NO: 536 - DNA, 228 bp, Panax ginseng
tcagtagtgaataagttcccaagaagattgaagacgaagataaggtcgtctgtggccgaagaacaacaaaccctaattccaactgaagatgggactgaagaagcacaagcatcttcggccacagagcagcccgtttctgttcccgtctctccttccgattttctcaccatgctctttcaggctgaaggaaccatgactgaaacagctgttcctacagttaccaaggct

SEQ ID NO: 537 - protein, 75 aa, Panax ginseng
MVRKSEGETGTETGCSVAEDACASSVPSSVGIRVCCSSATDDLIFVFNLLGNLFTTETLEILELEMVTWLCNRTN

SEQ ID NO: 538 - DNA, 240 bp, Panax ginseng
gtttcagtagtgaataagttcccaagaagattgaagacgaagataaggtcgtctgtggccgaagaacaacaaaccctaattccaactgaagatgggactgaagaagcacaaacatcttcggccacagagcagccagtttctgttcccgtctctccttccgatgttctcaccatgctctttcaggctgaaggaaccatgactgaaacagctgttcctacagttaccaaggctttagaggaa

SEQ ID NO: 539 - protein, 79 aa, Panax ginseng
MVRTSEGETGTETGCSVAEDVCASSVPSSVGIRVCCSSATDDLIFVFNLLGNLFTTETLEILELEMVTWLCNRTNWSGR

SEQ ID NO: 540 - DNA, 405 bp, Picea glauca
atgctgacccccaagaggaggggctggcctggatggtctcccaagacgccttctcctcctcctccagccgaagagatggcgggttcgagtcacgtcgtgacgcccactgccacagcaggaggcagcagcggaggtagggctttagtggaggctccaccgcggaatttattggacaataatggcgaaatcgtggccgcgcgcggcgaccccgagatctggaggcgtttcagggaggccggatctctggacgaggaatccctcgagaaaaaagatcgggccgctttagtcgtgcacgttaccaaactcgaagccgagatgtttggaatgtcaaaaatcgttgcggagaaaaatgcaagccctgagacagtagagagtgtcctccatcttcgaacaacgacatcctga

SEQ ID NO: 541 - protein, 134 aa, Picea glauca
MLTPKRRGWPGWSPKTPSPPPPAEEMAGSSHVVTPTATAGGSSGGRALVEAPPRNLLDNNGEIVAARGDPEIWRRFREAGSLDEESLEKKDRAALVVHVTKLEAEMFGMSKIVAEKNASPETVESVLHLRTTTS

SEQ ID NO: 542 - DNA, 195 bp, Pennisetum glaucum
ttaaaatgtactcatgtggccatatatagagtagaatgccatgaacacttgaagtggagaagcaattgatcagtagaataactggtgaaggtttatgaagcttttgtatactccatgcaaagatcttaaacgttctttaatttttcgtagcaacaagtgtagcatggatgcaattagcctccttcggttacttcc

SEQ ID NO: 543 - protein, 64 aa, Pennisetum glaucum
MTICPVESALPTVAWHANLHVFGFLLSNSFSFTVLGESISLPSTTSTMQVPKTPPPEQLRRNLS

SEQ ID NO: 544 - DNA, 381 bp, Petunia hybrida
  misc_feature (236)..(236): n is a, c, g, or t
atgaaaattaccgagaacaacataataaaacctcgtcctcggaccttctcaaggccggcaatgaatcatgtttcttgttggaacggcaaaagttgtaataaaaacactatagacaagaatgaaggtgacacagaaataataaaatttactgatgagaagcaaaaaccggaagaatcgatagatgatggacttcaatggtgggccaatttattagccaacaacattgagattaaggncttagctaatggtaattcaccaacattgttgcatgaagaaatagcaccattggtaaatattgagagcaacctcatgcaggaaggagaaagtggcctaagtgacttttcagttgatattgatggcatatgggatttacttagttaa

SEQ ID NO: 545 - protein, 126 aa, Petunia hybrida
  misc_feature (79)..(79): Xaa can be any naturally occurring amino acid
MKITENNIIKPRPRTFSRPAMNHVSCWNGKSCNKNTIDKNEGDTEIIKFTDEKQKPEESIDDGLQWWANLLANNIEIKXLANGNSPTLLHEEIAPLVNIESNLMQEGESGLSDFSVDIDGIWDLLS

SEQ ID NO: 546 - DNA, 198 bp, Pseudotsuga menziesii
atgcctcatttgttagctgacttgatggatcacattgatgagtttgttcatgcctccatggatgaacacaaaacatgctttgaaaagacaattaaaaagatgtttggaatgtcgaaaattgttgcagagaaaaatgcaagccctgaaccagtagagagtgtccttcatcttcgaacaacaacatcaaactcattataa

SEQ ID NO: 547 - protein, 65 aa, Pseudotsuga menziesii
MPHLLADLMDHIDEFVHASMDEHKTCFEKTIKKMFGMSKIVAEKNASPEPVESVLHLRTTTSNSL

SEQ ID NO: 548 - DNA, 294 bp, Physcomitrella patens
atgagccaggcggaggagccgaagccgcagcagagcgtgaaatctgagcaagcggcgccgcaggcatcgacttcatgccgcaagaagaagtcggagaattcgaccttctttggagacgtccttgaccatatcgatgaatttgtgcatgcgtcgtacgatgagcacaagacttgcttggagaaaacgcttcacaagatgtttggtatgtcgaaggcggtgtctaacgaagcacgacctacaagtgcgacgaatcccgtggaaaacgtgatgtctagacccgcgactactgactag

SEQ ID NO: 549 - protein, 97 aa, Physcomitrella patens
MSQAEEPKPQQSVKSEQAAPQASTSCRKKKSENSTFFGDVLDHIDEFVHASYDEHKTCLEKTLHKMFGMSKAVSNEARPTSATNPVENVMSRPATTD

SEQ ID NO: 550 - DNA, 498 bp, Pinus pinaster
atggcggaggtcgaggcacaagagcccactagccaggagaaagaggagccacaacagaaggaagaagtagcaggtgaaagtgaacagaagacagaagaggttattggtgaagtaattgctattgaggaacaaacaaaagaagtgcctgaagtggatgaaactactgccaaggtagaagctactacagaggcagaagttcccgcagaggaagaaacagctgtagaagaagaaactggagaagaggaaactgcagaggagccaaaagtcaagattgaggacttaaagactgcaccggcagacttccgttttcccacaactaatcaaactaggcactgctttactcgctatattgagtatcacaaatgcatagctgcaaaaggtgaaggagcaactgaatgtgagaagtttgccaggcattatcgttcactttgtcctggtgaatggattgaaagatggaatgagcagagggaaaatggaacttttcctggacctctgtaa

SEQ ID NO: 551 - protein, 165 aa, Pinus pinaster
MAEVEAQEPTSQEKEEPQQKEEVAGESEQKTEEVIGEVIAIEEQTKEVPEVDETTAKVEATTEAEVPAEEETAVEEETGEEETAEEPKVKIEDLKTAPADFRFPTTNQTRHCFTRYIEYHKCIAAKGEGATECEKFARHYRSLCPGEWIERWNEQRENGTFPGPL

SEQ ID NO: 552 - DNA, 279 bp, Picea sitchensis
cgtgggatacagacatggcacacccgggggcgtgtcctgttacttggtgtttgacatttattattgcccagttgtttaatggctgtgacatcggctgcctaacttgtgctacctcttttattataaaataggctgctaatttccaattaaatataaaaacaagagaacacaataatgtcaccaaattgtctttcataccaattcaattagaccaaatatcctctatacatcccatttgaaacttattaacgagggtccaaacatgtctttcacatacta

SEQ ID NO: 553 - protein, 92 aa, Picea sitchensis
MDKASHIDSASEKKSSTTPEMRSCRKKKSDDASFVADLMDHIDEFVHASMDEHKTCFEKTIKKMFGMSKIVAEKNASPETVESVLHLRTTTS

SEQ ID NO: 554 - DNA, 282 bp, Pinus taeda
atggataaaacaccccaaaaagattctgcttcagaaaagagattatcatctacaaccccagaaatgaggtcatgcagaaagaagaaatcagaggatgcctcatttgtagctgacttgatggatcacattgatgagtttgttcatgcctctatggatgagcacaaaacatgctttgaaaagacaattaaaaagatgtttggaatgtcaaaaatcgttgcagagaaaaatgcaagcactgagacagtagagagtgtcctcccgcttcgaacaacaacgtcctga

SEQ ID NO: 555 - protein, 93 aa, Pinus taeda
MDKTPQKDSASEKRLSSTTPEMRSCRKKKSEDASFVADLMDHIDEFVHASMDEHKTCFEKTIKKMFGMSKIVAEKNASTETVESVLPLRTTTS

SEQ ID NO: 556 - DNA, 207 bp, Puccinellia tenuiflora
tataagtttcggttttgtctaggtgctcctggattacaaggtgtcgtaattaacagtataacaggtaaaaaaggtagagcaaagaaaaatggtgcagatcgagaagaagctgcctagactggacagacctgggtaggtttcgagctatgtacacacacaccaccgtcggttccatgatcggttgcatgcatcttcttcacgggattc

SEQ ID NO: 557 - protein, 68 aa, Puccinellia tenuiflora
MQARSCYHATINKLENHLVIRSDQIRSDQNSEHGHCRSNPVKKMHATDHGTDGGVCVHSSKPTQVCPV

SEQ ID NO: 558 - DNA, 381 bp, Populus tremula
atgctggcaacagaagtcactgtattgtggaggtattcctatgaatctgcatctagcatccccaagaacccactttactttacagagagatatttggatgtgaaaaaatctttggccaacactttctttggtcctcttaaggaaggcgtatacagtgcatctgttcaaaggactctttttctaatggcaaaggctgtactcaacagatttcctgacatatcatccatccaactaaaaatgccaaatatccatttcctaccggtcaacatatcaagcaaggaaaacaccattgtgaagttcaatgatgatgtttttctaccgaccgacgagccacatggttcaatagaagcaagcttgagccgcttctggtcaaagatgtag

SEQ ID NO: 559 - protein, 126 aa, Populus tremula
MLATEVTVLWRYSYESASSIPKNPLYFTERYLDVKKSLANTFFGPLKEGVYSASVQRTLFLMAKAVLNRFPDISSIQLKMPNIHFLPVNISSKENTIVKFNDDVFLPTDEPHGSIEASLSRFWSKM

SEQ ID NO: 560 - DNA, 237 bp, Populus tremula
atgatgccaattttattggtggatgtgaaggatcacattgatgagttcatccatgacatctatggatgagacaaaaggattgtttcaagaagactatcaagaagatgtttggaatgtcgaagattgttagctgagaggagtgctgatgctaaggaagtcgagagtgctcttccatctccgaaccacagtggcagagtagaatgtcttcacccgtgttctaatgggctcataatgcta

SEQ ID NO: 561 - protein, 78 aa, Populus tremula
MMPILLVDVKDHIDEFIHDIYGDKRIVSRRLSRRCLECRRLLAERSADAKEVESALPSPNHSGRVECLHPCSNGLIML

SEQ ID NO: 562 - DNA, 267 bp, Populus tremula
atggagacacagaaaactcaaccagaaaaacagcaatcacctgctgtcacctcatgccgacagaaaaagaaggatgatgccacttttttggtggatgtgaaggatcacattgatgagttcatccatgcatctatggatgagcacaaggattgtttcaagaagactatcaagaagatgtttggaatgtcgaagattgttgctgagaggagtgctgatgctaaggaagtcgagagtgctcttcctctccgaaccacagtggcagagtag

SEQ ID NO: 563 - protein, 88 aa, Populus tremula
METQKTQPEKQQSPAVTSCRQKKKDDATFLVDVKDHIDEFIHASMDEHKDCFKKTIKKMFGMSKIVAERSADAKEVESALPLRTTVAE

SEQ ID NO: 564 - DNA, 678 bp, Populus trichocarpa
atgtctgcttctacttcaactactcaactctttcaagattttcttggggacttctactcaagaagattgctattacataaccctctttaccaatcaacaaacacggcaactcctccagctcctggaaacagtgcgccatctgaaccttccactggcactggcagcagctttgatgcgaatgttgttatggtcctttcagttctgttgtgtgcactgatttgctcactggggctcaattccatcattaggtgtgcattaaggtgctctaacatagcagcttcagaatctgctgcgaacccctcgactcagtcagcaaacactggagtgaatcgaagagcattaaagtctttcccagtggtaaattactcaagtgacttgaacctgcctggccttgacacagagtgtgtaatatgcctctcagagttcactcctggtgagcgtgtgcggcttcttcctaagtgccaccatggattccatgtcaaatgcattgataagtggcttagctcccactcatcctgccctacatgcaggcactgcctgatagagacatgtcaaaaaattattggttgtagccaggctagcacatcaggaacctctctaccagtacaagaaaccattgtgagcatattgcccctagaacctgaaggtttgatacgagattacagggaaaatagctaa

SEQ ID NO: 565 - protein, 225 aa, Populus trichocarpa
MSASTSTTQLFQDFLGDFYSRRLLLHNPLYQSTNTATPPAPGNSAPSEPSTGTGSSFDANVVMVLSVLLCALICSLGLNSIIRCALRCSNIAASESAANPSTQSANTGVNRRALKSFPVVNYSSDLNLPGLDTECVICLSEFTPGERVRLLPKCHHGFHVKCIDKWLSSHSSCPTCRHCLIETCQKIIGCSQASTSGTSLPVQETIVSILPLEPEGLIRDYRENS

SEQ ID NO: 566 - DNA, 267 bp, Populus trichocarpa
atggagacacagaaaactcaaccagaaaaacagcaatcacctgctgtcacctcatgtcgacggaaaaagaaggatgatgccacttttttggtggatgtgaaggatcacattgatgagttcatccatgcatctatggatgagcacaaggattgtttcaagaagactatcaagaagatgtttggaatgtcgaagattgttgctgagaggagtgctgatgctaaggaagtcgagagtgctcttcctctccgaaccacagtggcagagtag

SEQ ID NO: 567 - protein, 88 aa, Populus trichocarpa
METQKTQPEKQQSPAVTSCRRKKKDDATFLVDVKDHIDEFIHASMDEHKDCFKKTIKKMFGMSKIVAERSADAKEVESALPLRTTVAE

SEQ ID NO: 568 - DNA, 282 bp, Populus trichocarpa
atggaaacacaaaaaagtcaaccagcaaaacagcagtcacctgcagccctggatccggccatcacttcatgccgaaggaagaagaaggatgatgccacttttttggaggatctgaaggatcacatcgatgagttcattcatgcatctatggatgagcacaaggattgttttacgaagactatcaagaagatgtttggaatgtcaaagattgttgcagagaggagtggtgatgctaaggaagtcgaaagttctttgcctctccaaactacagtggcaaagtag

SEQ ID NO: 569 - protein, 93 aa, Populus trichocarpa
METQKSQPAKQQSPAALDPAITSCRRKKKDDATFLEDLKDHIDEFIHASMDEHKDCFTKTIKKMFGMSKIVAERSGDAKEVESSLPLQTTVAK

SEQ ID NO: 570 - DNA, 645 bp, Phaeodactylum tricornutum
atgttccgtcccacgaagcggcaaagactggaagccccgccctcatggttggataacgaggctctcaattctgtagcgtcaccctttgcggcccagccgacgctgaagactgctattgtatcccaattcactaaagagctcttcctggaacgattccagaaagagattcgtgaccgtttctgcttttcactgtcgtcccagctgttggttgaccctgggtcgaaccgcccattatatgatatcgagctgtggcgtggtatcctgaaggggcggattgcgtttggggataacgccgtgacgcggatcttggaggcagcttcgtaccaagagactcaggctccccaactcatagtcatggcgacagatttacaaccaccaacgcagcttgcgcatattccaatcctatgtcgtcagcttgccacctgtcgacatgtgcacattcctctcatgcttcttccgggaccgtcttcgctggaactagggaagcttttgggaacacgtagggtttctgtcttggcatttatgccgcgctacaaaggaaatgattccatggacttggaggagcgacgggatcatgcggatgcctacgtccacgacgcagttgactcgttcgtagcgtttattagctcaaagaaagcgccataa

SEQ ID NO: 571 - protein, 214 aa, Phaeodactylum tricornutum
MFRPTKRQRLEAPPSWLDNEALNSVASPFAAQPTLKTAIVSQFTKELFLERFQKEIRDRFCFSLSSQLLVDPGSNRPLYDIELWRGILKGRIAFGDNAVTRILEAASYQETQAPQLIVMATDLQPPTQLAHIPILCRQLATCRHVHIPLMLLPGPSSLELGKLLGTRRVSVLAFMPRYKGNDSMDLEERRDHADAYVHDAVDSFVAFISSKKAP

SEQ ID NO: 572 - DNA, 546 bp, Phaeodactylum tricornutum
atggcgctgcacgccgcaacatacaagaatagttcggttcacggaatcctattgggaagctcgacgaaaggcgtgattgtggtggaagatgctgttcctgtatcgcacggggctccgaccaagcctctggttgaaattagcttgggtctggtgcaagccaaaagcgatcacaccatagttggatggtacactgcgccggagctattttccgatagccgacccggaccagtcgccctgcgtatgacagccaacttggctactggtacaattgaaccgactttgattgtgttgcaaaatggacctttgtcgaaatgtcttggaggagaaggtaaagcagatggtgttttgcaagcttttggaaaagactttggtcaacagtatcttgaatcggttgaaactgctgtacaggatgggccaaaagctagccgagcggtgcaggaagctttcaaggatagcacaaaactagaggatctagaggatcacttgaaagggccgcaacatgcttcctggtatcccagctccgcactatctaacctgtcactatga

SEQ ID NO: 573 - protein, 181 aa, Phaeodactylum tricornutum
MALHAATYKNSSVHGILLGSSTKGVIVVEDAVPVSHGAPTKPLVEISLGLVQAKSDHTIVGWYTAPELFSDSRPGPVALRMTANLATGTIEPTLIVLQNGPLSKCLGGEGKADGVLQAFGKDFGQQYLESVETAVQDGPKASRAVQEAFKDSTKLEDLEDHLKGPQHASWYPSSALSNLSL

SEQ ID NO: 574 - DNA, 381 bp, Phaeodactylum tricornutum
gaagcggcagcagtcgaaccttgcccctttatgattatcattgacggaggttccaccggaagtcgtttgcacgtctttgaattcgtctaccaaatcccaaagcgggtggatactgaatcacagtatgcggagtcggaaccggaacgacgacttgttttggaacgccggggatcggcacgggcggacgtgcccttgtcggcctttggaccgacaagggaacagcccctggtcaaagcaactcacgtcgccgcacacttgctgcccgcctttgtgcaagccgcacgcattattccgccacgctaccacgccactactactgtcaagtatcaagcaaccgccggtatgcggctcttgtccgaccgcgaccaacaactagtttac

SEQ ID NO: 575 - protein, 126 aa, Phaeodactylum tricornutum
MLLLLLLSQNQSHTEGPFHFRPVHEERKSDISGLWRKAESVTEQRYHIHCFETPVRKYFGTCKCVRIVLDLDQIVVPRATAQTFQRVEKFLNAWCRPRFVQCLMSLRVIARKLAETVERKEKQTHS

SEQ ID NO: 576 - DNA, 444 bp, Poncirus trifoliata
atgggacctagtgggagtggtaaaacttctttgttaagggctatggctggtctttggagtgatggaagaggaaaaattacattctatgtgaaagacagggaagaaactgacgcacatacttcagatgtggactctcttgaagtaaattctcaaaatatgaatggggagcttacaagatccatgaatagaaactcaagaggagtattttttcttcctcagagaccatatatggttttaggtagtcttcgtcaacaattgctttatcctacgtggactgaagaagtgaaaccggcgtctgatgctgcaaaatccgctggtatgcatttacattattttaaaaacacttgcaacaagacctttaaaataagttggcaaatggagtggctaattgcagttggaagagtggctttagctgaaggacctttggcagtaaatttattataa

SEQ ID NO: 577 - protein, 147 aa, Poncirus trifoliata
MGPSGSGKTSLLRAMAGLWSDGRGKITFYVKDREETDAHTSDVDSLEVNSQNMNGELTRSMNRNSRGVFFLPQRPYMVLGSLRQQLLYPTWTEEVKPASDAAKSAGMHLHYFKNTCNKTFKISWQMEWLIAVGRVALAEGPLAVNLL

SEQ ID NO: 578 - DNA, 330 bp, Panicum virgatum
atgatgctcacaccactacttcgaacagctagcaagatataatacgatactagtttctgacgagaccaaaaaagtcccaagttttcgccaccgtagaacatgcccaagatcatttattacattggctgtttccccaaaaaagacgaccggccccttcagcgaggctcaactgctgccggcttggccccctcctgagtctcatccttgaccacgggctcgaccttctgcttgccgaacaccgagctgcacttctgggagaagtagttcttgaggcagatccagtgcttctgcgcgggcatcgccttgaactggttgaagtagtccttggcg

SEQ ID NO: 579 - protein, 109 aa, Panicum virgatum
MEKAACVRKEAVAAPEEAPPTLTAPPTLMAPEKEPEKCYKKTMGEEATFLESAKDYFNQFKAMPAQKHWICLKNYFSQKCSSVFGKQKVEPVVKDETQEGAKPAAVEPR

SEQ ID NO: 580 - DNA, 231 bp, Panicum virgatum
atggattcaagcaatgcccaatctgaaggttcagccccatctgttccaaaaaaccctgccatggcttcatgcaggaagaagaaaactgatgatgctaccttcatcgaagatctgaaagaccacatcgatgagttcattcacgcctccctggatgagcacaagacctgctttaagaagactattcagaaggttgtctgcaccagtaaactgaaattgggttttctccaataa

SEQ ID NO: 581 - protein, 76 aa, Panicum virgatum
MDSSNAQSEGSAPSVPKNPAMASCRKKKTDDATFIEDLKDHIDEFIHASLDEHKTCFKKTIQKVVCTSKLKLGFLQ

SEQ ID NO: 582 - DNA, 291 bp, Panicum virgatum
atggattcaagcaatgttcaatccgaaggttcagccccatctgttccaaaaaacccggccatggcttcatgcaggaagaagaaaaccgatgatgctacgttccttgaagatctgaaagaccacatcgatgagtttgttcatgcctccatggatgagcacaagacctgctttaagaagacaattcagaagatgtttgggatgtcaaaggctgttgcagagcgatcagcagcgggggcaaaggaagctgaagttgaaagtgctctgcctcttcagaccagtgtctcgcagtag

SEQ ID NO: 583 - protein, 96 aa, Panicum virgatum
MDSSNVQSEGSAPSVPKNPAMASCRKKKTDDATFLEDLKDHIDEFVHASMDEHKTCFKKTIQKMFGMSKAVAERSAAGAKEAEVESALPLQTSVSQ

SEQ ID NO: 584 - DNA, 291 bp, Panicum virgatum
atggattcaagcaatgcccaatctgaaggttcagccccatctgttccaaaaaactctgccatggcttcatgcaggaagaagaaaactgatgatgctaccttcatcgaagatctgaaagaccacatcgatgagttcattcacgcctccatggatgagcacaagacctgctttaagaagactattcagaagatgtttgggatgtcaaaggttgttgcagagcgatcagccgcgggggcaaaggaagctgaagttgaaagtgctctgcctcttcagaccagtgtctcgcagtag

SEQ ID NO: 585 - protein, 96 aa, Panicum virgatum
MDSSNAQSEGSAPSVPKNSAMASCRKKKTDDATFIEDLKDHIDEFIHASMDEHKTCFKKTIQKMFGMSKVVAERSAAGAKEAEVESALPLQTSVSQ

SEQ ID NO: 586 - DNA, 345 bp, Panicum virgatum
atggagaaggcggcctgcgcgaggaaggaggcggtggcggtggcggtgccggaggaggcgacgccgaccctgaccgcgccgccgaccctgatggcgccggagaaggagcccgagacgcgggagaagtgctacaagaagacggtgggggaggaggcgacgttcctggagagcgccaaggactacttcaaccagttcaaggcgatgcccgcgcagaagcactggatctgcctcaagaactacttctcccagaagtgcagctcggtgttcggcaagccgaaggtcgagcccgtggtcaaggatgagactccggaggtggcgaagccagcagcagttgagtctcgctga

SEQ ID NO: 587 - protein, 114 aa, Panicum virgatum
MEKAACARKEAVAVAVPEEATPTLTAPPTLMAPEKEPETREKCYKKTVGEEATFLESAKDYFNQFKAMPAQKHWICLKNYFSQKCSSVFGKPKVEPVVKDETPEVAKPAAVESR

SEQ ID NO: 588 - DNA, 555 bp, Panicum virgatum
atggcagctgacaagtttctcaatctgaagtacttaaggattcatcttactggtttttctaaggctttttgcccagactatgactatctgtctttggtttcgtttctggatgcttcacctaccttggagactttcatcctgagtgtaaagcagaatgacatgaagcatgattcagtttttgggaatgccttgcatgtggggtcgattcctgcacacaagcatagcaggcttaggaaggtgcagatcattggcttctgctctgcaaagagcatggttgagctcacttgtcatattctcgagaatgcaacatcccttgaaagccttacattggacaccatatttgatcagtttgatcagggtacagtggttgagcatggcgattgtaggaggcgttgtgtccaaaaatacagtggatgcggtctgatttcaagggagatgatattggaagcacatgaagctctcagggttgtcagtatatacatcataggaagagtaccccctgcagttcagttaaatgttagggggccttgcagccagtgtcataaggtaccgtag

SEQ ID NO: 589 - protein, 184 aa, Panicum virgatum
MAADKFLNLKYLRIHLTGFSKAFCPDYDYLSLVSFLDASPTLETFILSVKQNDMKHDSVFGNALHVGSIPAHKHSRLRKVQIIGFCSAKSMVELTCHILENATSLESLTLDTIFDQFDQGTVVEHGDCRRRCVQKYSGCGLISREMILEAHEALRVVSIYIIGRVPPAVQLNVRGPCSQCHKVP

SEQ ID NO: 590 - DNA, 312 bp, Panicum virgatum
tactggatcgatgatgctcacaccactacttcgaacagctagcaagatataatacgatactagtttctgacgagaccaaaaaagtcccaagttttcgccaccgtagaacatgcccaagatcatttattacattggctgtttccccaaaaaagacgaccggccccttcagcgagactcaactgctgccggcttggccccctcctgagtctcatccttgaccacgggctcgaccttctgcttgccgaacaccgagctgcacttctgggagaagtagttcttgaggcagatccagtgcttctgcgcgggcatcgc

SEQ ID NO: 591 - protein, 103 aa, Panicum virgatum
MEKAACVRKEAVAAPEEAPPTLMAPEKEPEKCYKKTVGEEATFLESAKDYFNQFKAMPAQKHWICLKNYFSQKCSSVFGKQKVEPVVKDETQEGAKPAAVESR

SEQ ID NO: 592 - DNA, 294 bp, Panicum virgatum
atggattcaagcaatgctcaatctgaaggttcagccccatctgttccaaaaaaccctgccatggcttcatgccggaagaagaaaaccgatgatgatgctaccttcatcgaagatctgaaagaccatatcgatgagttcatttatgcctccatggatgaacacaagacctgctttaagaagacaattcagaagatgttcgggatgtcaaaggttgttgcagagcgatcagccacgggggcaacggaagctgaagttgaaagtgctctgcctcttcaaaccagtgtctcgcagtag

SEQ ID NO: 593 - protein, 97 aa, Panicum virgatum
MDSSNAQSEGSAPSVPKNPAMASCRKKKTDDDATFIEDLKDHIDEFIYASMDEHKTCFKKTIQKMFGMSKVVAERSATGATEAEVESALPLQTSVSQ

SEQ ID NO: 594 - DNA, 279 bp, Panicum virgatum
atgtctagtggcacccaatctgagggatcacaccaacctgcttcaaaacctgctgtgaattcatgccgaaagaatgtacctgggacttcattcgtctcagatttgagagatcacatccatgagttcattcatgcctctgctgatgaacaccggacatgcttcacaaagacaatgaagaagatgtttgggatgtcaaagattgtcgctgagaaatcctctaaagtagaggaggatggacctgaaagtgtgttaccacttcagaccacagtgtcacagtag

SEQ ID NO: 595 - protein, 92 aa, Panicum virgatum
MSSGTQSEGSHQPASKPAVNSCRKNVPGTSFVSDLRDHIHEFIHASADEHRTCFTKTMKKMFGMSKIVAEKSSKVEEDGPESVLPLQTTVSQ

SEQ ID NO: 596 - DNA, 276 bp, Phaseolus vulgaris
atggatactacaaaagggaacactgaaaaaccgtcttcattagctgcaagtgttacttcatgtcgaaagaagaagagtgaagaagccacttttttggaggacgtgaaagatcacattgacgagtttattcatgcttctatggatgaacataaatcttgcttcaagaaaactgttcagaagatgtttggtatgtccaaggctgttgcagaaaggaacactgacactgccaaagaagttgagagttctctgcctcttcagacaactttgcaaggttaa

SEQ ID NO: 597 - protein, 91 aa, Phaseolus vulgaris
MDTTKGNTEKPSSLAASVTSCRKKKSEEATFLEDVKDHIDEFIHASMDEHKSCFKKTVQKMFGMSKAVAERNTDTAKEVESSLPLQTTLQG

SEQ ID NO: 598 - DNA, 315 bp, Prototheca wickerhamii
  misc_feature (245)..(245): n is a, c, g, or t
atgcaaggcggcgctgcaagtgctggtcgcgctgggctccggcgcggcgctcgagggtcggctgcacctgtccccggctctcccgccctccttcctcgccggccagctggacatggcgaccgtcgcggctgtgggacacagttacggcggggccaccgtggcggccctggtgtcccaggacccgcgcttcgcctgcggcgtcgccctcgacccctggtggtttgcgatgccgccagagagcgcgngcaacacggcctggcagacgagcacgcccctcctcatccttggttccaacacctggaacgtgctgaatga

SEQ ID NO: 599 - protein, 104 aa, Prototheca wickerhamii
  misc_feature (82)..(82): Xaa can be any naturally occurring amino acid
MQGGAASAGRAGLRRGARGSAAPVPGSPALLPRRPAGHGDRRGCGTQLRRGHRGGPGVPGPALRLRRRPRPLVVCDAARERXQHGLADEHAPPHPWFQHLERAE

SEQ ID NO: 600 - DNA, 234 bp, Plumbago zeylanica
atggcagagattgatctgaaaactgcacccgctgactttcgatttcccacaactaaccaaacaaggcactgcttcacccgctacatagagttccacaggtgcattagagtgaaaggtgaagagtcaaatgaatgtgcaaagtttgcgaaatactatcgctccctttgtcctggtgaatgggttgagcgctggaatgagcagagggagaacggtacatttgctgggcctctttga

SEQ ID NO: 601 - protein, 77 aa, Plumbago zeylanica
MAEIDLKTAPADFRFPTTNQTRHCFTRYIEFHRCIRVKGEESNECAKFAKYYRSLCPGEWVERWNEQRENGTFAGPL

SEQ ID NO: 602 - DNA, 297 bp, Rosa chinensis
aagtcgaagacagctcgtctgagaaacttgggagaagcaaaaacctgctaaaggaagccagcttgactcgaacaagaaagcaatgacaatccagtgcaaggtatgcatgcaggctttcatctgcaccacaactgaggtcaagtgcagggaacatgcagaggcaaagcatcccaaatctgatgtttatgcatgttttccacatcttcaaaagtgaaataattcaatcccgagagggaaacaacatgtagctgaaatgtgtttaacatcacctcttgtaatcatactcggatgacctcc

SEQ ID NO: 603 - protein, 98 aa, Rosa chinensis
MWKTCINIRFGMLCLCMFPALDLSCGADESLHAYLALDCHCFLVRVKLASFSRFLLLPSFSDELSSTSDRCLHPFVLLLLFFEDFQLTREGSDTDLEF

SEQ ID NO: 604 - DNA, 471 bp, Rosa chinensis
  misc_feature (17)..(17): n is a, c, g, or t
  misc_feature (456)..(456): n is a, c, g, or t
atggcgcgcttcccatntgagttccttgagcatcttaagggttgtcacaaaggtgacaaggtcaagggcatcaatgacctgaagaagtaccttctaaagttcggttacttaaactacgagaaccacagacatttcaacgatgatgattttgacgagctcttggaggaagccgtcaagacttaccagctcaatttccacctcaagcccacgggaacattggacgacaaaaccgtatcaacgatgatgatgcctcgttgtggtgtgcccgatatcatcaatggcaccacatccatgagatcaacccagataaagcgccagcaccgtgcaattcataccaccgttcactactcatttcccgatggaaatctaaaatggccttcttcaaaataccatctgacttacggttttctcgccggcgccccatccgaagccccaggtgctgtcgcacagggcttnctcaacatgggctaa

SEQ ID NO: 605 - protein, 156 aa, Rosa chinensis
  misc_feature (6)..(6): Xaa can be any naturally occurring amino acid
  misc_feature (152)..(152): Xaa can be any naturally occurring amino acid
MARFPXEFLEHLKGCHKGDKVKGINDLKKYLLKFGYLNYENHRHFNDDDFDELLEEAVKTYQLNFHLKPTGTLDDKTVSTMMMPRCGVPDIINGTTSMRSTQIKRQHRAIHTTVHYSFPDGNLKWPSSKYHLTYGFLAGAPSEAPGAVAQGXLNMG

SEQ ID NO: 606 - DNA, 615 bp, Rosa chinensis
atggcaccaaaatctgatatttctcttttcaaagtcactcccctcctcctcctcgccctcttttctttcctctctaatgcagcggcaaactcatctccgcttgagttccttgagcatcttaagggttgtcaaaaaggtgacaaggtcaagggcatcaatgacctcaagaagtaccttcacaacttcggttacttgaactacaagaaccacattcattctgatgacgatgatttcgacgagctcttggaggaagccgtcaagacttaccagctcaatttccacctcaagtccaccggaacgttggacgacaaaaccatattacagatgatgatgcctcgttgtggcgtgcccgatatcgtcaatggcaccacatccatgcgagcagccaagataaagcaccagcacggttcaattcataccactgttcactactcatttcctaatggaaaaccaaaatggccttcctctaaataccatctgacatacgctttcttccccggcaccccatcccaagccacgggtgctatagcacaggctttcgcaacatgggctagaagcactcacttcaagttcagtcaggcccaaaattaccagaatgcagatgtcaagatttag

SEQ ID NO: 607 - protein, 204 aa, Rosa chinensis
MAPKSDISLFKVTPLLLLALFSFLSNAAANSSPLEFLEHLKGCQKGDKVKGINDLKKYLHNFGYLNYKNHIHSDDDDFDELLEEAVKTYQLNFHLKSTGTLDDKTILQMMMPRCGVPDIVNGTTSMRAAKIKHQHGSIHTTVHYSFPNGKPKWPSSKYHLTYAFFPGTPSQATGAIAQAFATWARSTHFKFSQAQNYQNADVKI

SEQ ID NO: 608 - DNA, 258 bp, Rosa hybrid cultivar
atgggaggaggcgagcatgctcacggcgagggtgcccacggcggagacttcagggcaaaggtgtggagcatgagcggtgggccctactgcaggcccaagcactggaagcgcaacacggctttcgccatgttcggagtcttcctcatctgcattcccatcgccatgaaatctgccgagctcgagcaacggccacatcaaccagttcgccccattccttcacaaatgtggtgcaagaactttggaaagaaagactactga

SEQ ID NO: 609 - protein, 85 aa, Rosa hybrid cultivar
MGGGEHAHGEGAHGGDFRAKVWSMSGGPYCRPKHWKRNTAFAMFGVFLICIPIAMKSAELEQRPHQPVRPIPSQMWCKNFGKKDY

SEQ ID NO: 610 - DNA, 234 bp, Spartina alterniflora
atgggagggcattgccctcaaaatgggaggacgctgagaggtggatcttcagcccaaattccaatgatggacttggaagagcctcggcagctcatgctcggcgaccaaaatctaaaagtggtcctctgggacctcctggaagacttggtggacaatattcatctgtttcttcatcagcgtcgatgcttgacagtgggagagttggacaattcacagcgaattctccttttgtag

SEQ ID NO: 611 - protein, 77 aa, Spartina alterniflora
MGGHCPQNGRTLRGGSSAQIPMMDLEEPRQLMLGDQNLKVVLWDLLEDLVDNIHLFLHQRRCLTVGELDNSQRILLL

SEQ ID NO: 612 - DNA, 291 bp, Spartina alterniflora
atggattcaggcagtactcaacctacaggttcagcggcctcgtctgttccaaaaaaccctgcaatgacatcgtgcaggaagaagaaatccgaggaggctacttttatcgaagatgtgagagaccacattgatgagttcattcatgcctccatggatgagcacaagacctgcttcaagaagaccattcagaagatgtttggcatgtcaaaggctgttggggagcgatccgcagaagcgaagggagctgaagttgaaagtgcattgccgcttcagactagtgtttcacagtag

SEQ ID NO: 613 - protein, 96 aa, Spartina alterniflora
MDSGSTQPTGSAASSVPKNPAMTSCRKKKSEEATFIEDVRDHIDEFIHASMDEHKTCFKKTIQKMFGMSKAVGERSAEAKGAEVESALPLQTSVSQ

SEQ ID NO: 614 - DNA, 363 bp, Sorghum bicolor
atggagaaggaagacggcgtgaagaaggtggcggtggtggcgccagaggaggcgacgccgaccctcaccgcgacaccgaccctcaccgcgccgctgccggcaccggagaaggagccggagatgcaggggaagtgctacaagaagacggtgggggaggaggcgacgttcctggagaccgccaaggactacttcaaccagtttaaggagatacccgcccagaagcactggatctgcctcaagaactacttcaaccagaagtgcggctcggtgttcggcaagcagaaggtcgagcctgtggtgaaggatgatgcaactccggaggtggtggcgaagccggcaactgcaccagtggaatctaactga

SEQ ID NO: 615 - protein, 120 aa, Sorghum bicolor
MEKEDGVKKVAVVAPEEATPTLTATPTLTAPLPAPEKEPEMQGKCYKKTVGEEATFLETAKDYFNQFKEIPAQKHWICLKNYFNQKCGSVFGKQKVEPVVKDDATPEVVAKPATAPVESN

SEQ ID NO: 616 - DNA, 291 bp, Sorghum bicolor
atggcttcaagcactagtcagacagaagctccagccccatctgtccccaaaaatcctgcaatggcatcatgccggaagaagaaaacagatgatgctaccttccttgaagatctgaaagaccacatcgatgagttcattcatgcctccatggatgagcacaagacctgctttacgaagacgatccaaaagatgtttgggatgtcaaaggctgttgcagagagatctgcggcagaagcaaaggaagctgaagttgaaagtgctttgccacttcagaccagcgtctctcagtag

SEQ ID NO: 617 - protein, 96 aa, Sorghum bicolor
MASSTSQTEAPAPSVPKNPAMASCRKKKTDDATFLEDLKDHIDEFIHASMDEHKTCFTKTIQKMFGMSKAVAERSAAEAKEAEVESALPLQTSVSQ

SEQ ID NO: 618 - DNA, 285 bp, Sorghum bicolor
atgacgatgtccgggcgcaccgaacctgaaggatcacatcaacttgattcaaaacgtgctgtgcattcatgccgaaaaaatgtacctggctcatcattcgtctcagatttgaaagatcacatccacgagttcatcaatgcttctgcagatgaacacaggacatgcttcacaaagactatcaagaagatgtttgggatgtcaaagactgtcgcacagagatcctctgaagcagaggaagctggtccagcaagtgtcttgccacttgagaccactgtgtcgcggtag

SEQ ID NO: 619 - protein, 94 aa, Sorghum bicolor
MTMSGRTEPEGSHQLDSKRAVHSCRKNVPGSSFVSDLKDHIHEFINASADEHRTCFTKTIKKMFGMSKTVAQRSSEAEEAGPASVLPLETTVSR

SEQ ID NO: 620 - DNA, 279 bp, Sorghum bicolor
atgtctggtcatacccaacctgaaggaccacaccaacttgattcaaaacgtgctgtgaactcatgccgaaagaatgtacccggcacatcattcgtatcagatttgagagatcacatccacgagttcatcaatgcctctgcagatgaacaccggacatgcttcacaaagactatcaagaggatgttccagatgtcaaagactgtcactgagagatcctctgaagctgaggaagctggatccgaaagtgtcttgccacttcagaccacagtgtcgcggtag

SEQ ID NO: 621 - protein, 92 aa, Sorghum bicolor
MSGHTQPEGPHQLDSKRAVNSCRKNVPGTSFVSDLRDHIHEFINASADEHRTCFTKTIKRMFQMSKTVTERSSEAEEAGSESVLPLQTTVSR

SEQ ID NO: 622 - DNA, 297 bp, Saruma henryi
atcttcagatttcttcctgcgacaagaggtcgagacaggcgttgtcgcagatgttgactgttgcgcattagaataattgttctgagactccatccttcttttgtttcctctcttcaaaaaaccctagaagcaaaaagaataagaaacaacgggtggcggaaataaagagccggctcctcctttcctcccgtctccttactattgctcgaaaatcggctccggcaaccggcggcgtaagcgtgatttctgtctggtcggtggcccgtggctgtgagattgcctgagaaagaagggact

SEQ ID NO: 623 - protein, 98 aa, Saruma henryi
MESQNNYSNAQQSTSATTPVSTSCRRKKSEDATFLEDIKDHIDEFINASMDEHKSCFKKTIQKMFGMSKVVSERAAANDGVESSLPLQTTVAGVNDRG

SEQ ID NO: 624 - DNA, 249 bp, Saccharum hybrid cultivar
atgaggctcatagcttcgacaccacctgcaagcaatcctcagctggccaacgtgctacctgtggtcattcctgatgtgcctgaaagtatataccgggccaataatgtgaacaagcatgttgatgtgggcctcaatgacaaagcatttggtatgtcttgtgttgctgctgtgtttggaagtgggattgcacaagctgaggatgaagttccaagcggagatgattcacaagagcagtttgcccgaatatga

SEQ ID NO: 625 - protein, 82 aa, Saccharum hybrid cultivar
MRLIASTPPASNPQLANVLPVVIPDVPESIYRANNVNKHVDVGLNDKAFGMSCVAAVFGSGIAQAEDEVPSGDDSQEQFARI

SEQ ID NO: 626 - DNA, 267 bp, Solanum lycopersicum
atgtcgacggaaaaaagtccgcttgagcaaacgtcaccggctgttgcatcatcatgccgaaaaaagaagtctgaaagtgccacatttttggaggatgtgaaggatcatattgatgagtttatacatgcctcaagggatgaacacgcatcttgctttaaaaaaaccatcaataaaatgtttgggatgtctaaaattgtcgctgaaaaaaatgctgaaccaaaggaggttgaaagctcacttcctctccaaactgttgtatctgagtaa

SEQ ID NO: 627 - protein, 88 aa, Solanum lycopersicum
MSTEKSPLEQTSPAVASSCRKKKSESATFLEDVKDHIDEFIHASRDEHASCFKKTINKMFGMSKIVAEKNAEPKEVESSLPLQTVVSE

SEQ ID NO: 628 - DNA, 282 bp, Solanum lycopersicum
atggcagcagaaaatgtccaaaatgagaagacatcatccgctgttactccaaatccagccatgacttcgtgtaggaagaagaagagcgaacaagcgacttttctagaagatatcaaggatcacatggatgaatttattcatgcttctatggatgaacacaaaacttgcttcaagaagaccattcaaaagatgtttggcatgtcaaaaattgttgcggaaaggaatgccgaggctaaagaggttgaaagttctctgcccctgcaaacaacattggctaagtag

SEQ ID NO: 629 - protein, 93 aa, Solanum lycopersicum
MAAENVQNEKTSSAVTPNPAMTSCRKKKSEQATFLEDIKDHMDEFIHASMDEHKTCFKKTIQKMFGMSKIVAERNAEAKEVESSLPLQTTLAK

SEQ ID NO: 630 - DNA, 357 bp, Saccharum officinarum
atggagaaggaagacggcgtgaagaaggtggcggtggcggcgcccgaggaggcgacgccgaccctgaccgcgacgccgaccctcaccgcgccgctgccggcaccggagaaggagccggagacgcggtgctacaagaagacggtgggggaggaggcgacgttcctggagaccgccaaggactacttcaaccagttcaaggagatacccgctcagaagcactggatctgcctcaagaactacttcaaccagaagtgcgcctcggtgttcggcaagcagaaggtcgagcctgtggtgaaggatgatgaaactccggaggtggtggcgaagccggcggcaacaacagttgaatctcactga

SEQ ID NO: 631 - protein, 118 aa, Saccharum officinarum
MEKEDGVKKVAVAAPEEATPTLTATPTLTAPLPAPEKEPETRCYKKTVGEEATFLETAKDYFNQFKEIPAQKHWICLKNYFNQKCASVFGKQKVEPVVKDDETPEVVAKPAATTVESH

SEQ ID NO: 632 - DNA, 279 bp, Saccharum officinarum
atgtctggtcatacccaacctgaaggaccacaccaacttgattcaaaacgcgctgtgaattcatgccgaaagaatgtacctggtacatcgttcgtctcagatttgagagatcacatccacgagttcatcaacgcctctgcagatgaacaccggacatgcttcacaaagactatcaagaggatgttcgagatgtcaaagattgtcactgagagatcctctgaagctgaggaagctggatccgaaagtgtcttgccacttcagaccacagtgtcgcggtag

SEQ ID NO: 633 - protein, 92 aa, Saccharum officinarum
MSGHTQPEGPHQLDSKRAVNSCRKNVPGTSFVSDLRDHIHEFINASADEHRTCFTKTIKRMFEMSKIVTERSSEAEEAGSESVLPLQTTVSR

SEQ ID NO: 634 - DNA, 312 bp, Saccharum officinarum
atggagaaggaagacggcgtgaagaaggtggcggtggcggcgctggaggaggtgacgccgaccgcgccgctgccagcaccggagaaggagccggagacgcaggagaagtgctacaagaagacggtgggggaggaggcgacgttcctggagaccgccaaggactacttcaaccagttcaaggagatacccgctcagaagcactggatctgcctcaagaactacttcaaccagaagtgcagctcggcaatgtcgcttgcgcccacccctctcctcttcttgatatcccattcgttctatgatgtgcgcgcatga

SEQ ID NO: 635 - protein, 103 aa, Saccharum officinarum
MEKEDGVKKVAVAALEEVTPTAPLPAPEKEPETQEKCYKKTVGEEATFLETAKDYFNQFKEIPAQKHWICLKNYFNQKCSSAMSLAPTPLLFLISHSFYDVRA

SEQ ID NO: 636 - DNA, 327 bp, Saccharum officinarum
aatttcaggcacagatagaggttcacattctaagaacttgaagcagaaacacagagggttcatgacgaattactggaccaaccattcccaaaccactaccacgacaactagcatgacatactatgatactagtttctggggagaccaaagaagtcttcaccaccgtagaacacccaaagattatttacattttgtttcctcgagacgatcagaacaccttcagtgagattaactgctgcaagacgaatagacgatcagaaccccttcagtgagattcaactgttgttgtcgccggcttcgccaccacctccggagtttcatcatcct

SEQ ID NO: 637 - protein, 108 aa, Saccharum officinarum
MEKEDGVKKVAVAAPETAPLPAPEKEPETQEKCYKKTVGEEATFLETAKDYFNQFKEIPAQKHWICLKNYFNQKCGSVFGKQKVEPVVKDDETPEVVAKPATTTVESH

SEQ ID NO: 638 - DNA, 336 bp, Saccharum officinarum
atggagaaggaagacggcgtgaagaaggtggcggtggcggcgcccgaggaggcgacgccgaccctgaccgcgacgctgccggcaccggagaaggagccggagacgcggtgctacaagaagacggtgggggaggaggcgacgttcctggagaccgccaaggactacttcaaccagttcaaggagatgcccgctcagaagcactggatctgtctcaagaactactttaaccagaagtgcgcctcggtgttcggcaagcagaaggtcgagcctgtggtgaaggatgatactccggaggtggtggcgaagccggcggcaacaacagttgaatctcactga

SEQ ID NO: 639 - protein, 111 aa, Saccharum officinarum
MEKEDGVKKVAVAAPEEATPTLTATLPAPEKEPETRCYKKTVGEEATFLETAKDYFNQFKEMPAQKHWICLKNYFNQKCASVFGKQKVEPVVKDDTPEVVAKPAATTVESH

SEQ ID NO: 640 - DNA, 210 bp, Suaeda salsa
ttgaggcaatggtagcagattttggactggcaaagttgtctgaagatgttaatactcatatatccacacgtgtgatgggaacctttggatacctggctcccgagtatgcttcaagtgggaaacttactgataaatctgatgtcttctcctttggagtcatgctcctggaattgattactgggcgacgacctgttgactcaacaaatgctt

SEQ ID NO: 641 - protein, 69 aa, Suaeda salsa
MSINIFRQLCQSKICYHCLKLVIQKNIGSFNIPMNDFRMTSSCKYANPLAVPRAILNLVGHSMVGCPLP

SEQ ID NO: 642 - DNA, 282 bp, Solanum tuberosum
atggcagcagaaaatgtccaaaatgagaaggcgccatcccctgttactccaaatccagctatgacttcatgtcggaagaagaagagcgaacaagcaaattttctagaagatatcaaggatcacatggatgaattcattcatgcttccatggatgaacacaaaacttgcttcaagaagaccattcaaaagatgtttggcatgtcaaaaattgttgcggaaaggaatgctgaggctaaagaggttgaaagttctcttcccctgcaaacaacattggctaagtag

SEQ ID NO: 643 - protein, 93 aa, Solanum tuberosum
MAAENVQNEKAPSPVTPNPAMTSCRKKKSEQANFLEDIKDHMDEFIHASMDEHKTCFKKTIQKMFGMSKIVAERNAEAKEVESSLPLQTTLAK

SEQ ID NO: 644 - DNA, 288 bp, Triticum aestivum
  misc_feature (99)..(99): n is a, c, g, or t
atggattccggtaatacccagacagacggttctcagccagctgctcctaagaaccctgccatgacgtcgtgccggaagaagaaaactgatgatgatgtnaccttccttgaagacgtgaaagaacacatcgacgagttcatccacgcgtccatggatgagcacaagacctgcttcaagaagaccattcagaagatgtttgggatgtcgaaggttgtcgcggaggtccgctgcagcaaaggaagtgaagtcgaaagcgctttgccccttcagaccagtgtgtcccagtag

SEQ ID NO: 645 - protein, 95 aa, Triticum aestivum
MDSGNTQTDGSQPAAPKNPAMTSCRKKKTDDDVTFLEDVKEHIDEFIHASMDEHKTCFKKTIQKMFGMSKVVAEVRCSKGSEVESALPLQTSVSQ

SEQ ID NO: 646 - DNA, 291 bp, Triticum aestivum
atggattccggtaatacgccgacagacggttctcagccagctgctcctaagaaccctgccatgacgtcgtgccggaagaagaaaactgatgatgatgttaccttccttgaagacgtgaaagaacacatcgacgagttcatccacgcgtccatggatgagcacaagacctgcttcaagaagaccattcagaagatgtttgggatgtcgaaggttgtcgcggagcggtccgctgccagcaaggaagctgaagtcgaaagcgctttgccccttcagaccagtgtgtcccagtag

SEQ ID NO: 647 - protein, 96 aa, Triticum aestivum
MDSGNTPTDGSQPAAPKNPAMTSCRKKKTDDDVTFLEDVKEHIDEFIHASMDEHKTCFKKTIQKMFGMSKVVAERSAASKEAEVESALPLQTSVSQ

SEQ ID NO: 648 - DNA, 291 bp, Triticum aestivum
atggattccagcactacacagtctgaaggttctcagccacctgttcctaaaaaccctgccatgacgtcgtgccggaagaagaaaactgatgatgatgttaccttccttgaagatgtgaaagaacacatcgacgagttcatccacgcgtccatggatgagcacaagacctgcttcaagaagaccattcagaagatgtttgggatgtcgaaggttgtcgcggagcggtccgctgcagcaaaggaagctgaagtcgaaagcgctttgccccttcagaccagtgtgtcccagtag

SEQ ID NO: 649 - protein, 96 aa, Triticum aestivum
MDSSTTQSEGSQPPVPKNPAMTSCRKKKTDDDVTFLEDVKEHIDEFIHASMDEHKTCFKKTIQKMFGMSKVVAERSAAAKEAEVESALPLQTSVSQ

SEQ ID NO: 650 - DNA, 348 bp, Triticum aestivum
atggagaggaaggagagcggggagaagatggagaaggtggaggtgggcgacggcgggaagaagccggaggaggggaccaagccggcgacggcgccggtgtgcttcaagaagccggcgggcgaggacaccggcatcctggagaccaccaaggactacttcaagcagctcaaggacaccagcgccgacacgcactgggactgcatcaagaaccgggtccgcgccgccggcgagtacatctccaacaagaccagctcggtgtttggcaggcagaaggtggagcctgaggccaaggaggagaccccgggggcgaagccagaagcagcaccggcgtcaggggagtctcagtga

SEQ ID NO: 651 - protein, 115 aa, Triticum aestivum
MERKESGEKMEKVEVGDGGKKPEEGTKPATAPVCFKKPAGEDTGILETTKDYFKQLKDTSADTHWDCIKNRVRAAGEYISNKTSSVFGRQKVEPEAKEETPGAKPEAAPASGESQ

SEQ ID NO: 652 - DNA, 342 bp, Triticum aestivum
atggagaggaaggagggcggggagaagatggaggaggtggaggtgggcgacggcgggaagaagccggaggaggggaccaagccggcgccggtgtgcttcaagaagccggcgggcgaggacaccggcatcctggagaccaccaaggactacttcaagcagctcgggaacaccagcgccgacacgcactgggactgcatcaagaacagggtccgcgccgccggcgagtacatctccaacaagaccagctcggtgtttggcaggcagaaggtggagcctgaggccaaggaggagacccggggggcgaagccagaagcagcaccggcggcagctgagtctcagtga

SEQ ID NO: 653 - protein, 113 aa, Triticum aestivum
MERKEGGEKMEEVEVGDGGKKPEEGTKPAPVCFKKPAGEDTGILETTKDYFKQLGNTSADTHWDCIKNRVRAAGEYISNKTSSVFGRQKVEPEAKEETRGAKPEAAPAAAESQ

SEQ ID NO: 654 - DNA, 291 bp, Triticum aestivum
atggattccggtaatacgcagacagacggttctcagccagctgctcctaagaaccctgccatgacgtcgtgccggaagaagaaaactgatgatgatgttaccttccttgaagacgtgaaagaacacatcgacgagttcatccacgcgtccatggatgagcacaagacctgcttcaagaagaccattcagaagatgtttgggatgtcgaaggttgtcgcggagcggtccgctgcagcaaaggaagctgaagtcgaaagcgctttgccccttcagaccagtgtgtcccagtag

SEQ ID NO: 655 - protein, 96 aa, Triticum aestivum
MDSGNTQTDGSQPAAPKNPAMTSCRKKKTDDDVTFLEDVKEHIDEFIHASMDEHKTCFKKTIQKMFGMSKVVAERSAAAKEAEVESALPLQTSVSQ

SEQ ID NO: 656 - DNA, 348 bp, Triticum aestivum
ggtcttttacaatgcgaaatcgctcaggcaaaccatgccccaactagtcgaacacaaggacaaagcgaaaagaaaaactccaggctgataagacctcgcaactctcagtgaatgaagcttcaggttggttcatggaagacgatcacgagctcaggacaagccttcactgagtctcagctgccgccggtgccccttctggcttcgcccccggggtctcctccttggcctcaggctccaccttctgcctgccaaacaccgagctggtcttgttggagatgtagtcgccggcggcgcggaaccggttcttgatgcagtcccagtgcgtgtcggcgctggtgtccttgagct

SEQ ID NO: 657 - protein, 115 aa, Triticum aestivum
MESKESGERMEKVEVGDGGKKPEEGTKQAAAPVCFKKPAGEDTGILETTKDYFKQLKDTSADTHWDCIKNRFRAAGDYISNKTSSVFGRQKVEPEAKEETPGAKPEGAPAAAETQ

SEQ ID NO: 658 - DNA, 291 bp, Triticum aestivum
atggattctggtaatacgcagacagaaggttctcagccacctgttcctaaaaaccctgccatgacgtcgtgccggaagaagaaaactgatgatgatgtcaccttccttgaagatgtgaaagaacacattgacgagttcatccacgcgtccatggatgagcacaagacctgcttcaagaaaaccattcagaagatgtttgggatgtcgaaggttgttgcggagcggtccgctgcagcaaaggaagctgaagtcgaaagcgctttgccccttcagaccagtgtgtcccagtag

SEQ ID NO: 659 - protein, 96 aa, Triticum aestivum
MDSGNTQTEGSQPPVPKNPAMTSCRKKKTDDDVTFLEDVKEHIDEFIHASMDEHKTCFKKTIQKMFGMSKVVAERSAAAKEAEVESALPLQTSVSQ

SEQ ID NO: 660 - DNA, 294 bp, Triticum aestivum
atggattccagcaatgcacagtctgaaggttctcagccacctgttcctcctaaaaaccctaccatgtcgtcgtgccggaagaagaaaaccgatgatgatgccaccttcctcgaagacgtgaaagagcacattgacgagttcatccatgcctccatggacgagcacaagacctgcttcaagaagaccatccagaagatgttcgggatgtcgaaggctgttgcggagcggtccgctgcagcaaaggaagctgaagtcgaaagcgctttgcctcttaagaccagtgtgtcccagtag

SEQ ID NO: 661 - protein, 97 aa, Triticum aestivum
MDSSNAQSEGSQPPVPPKNPTMSSCRKKKTDDDATFLEDVKEHIDEFIHASMDEHKTCFKKTIQKMFGMSKAVAERSAAAKEAEVESALPLKTSVSQ

SEQ ID NO: 662 - DNA, 288 bp, Triticum aestivum
atggattccggtaatacgcagacagaaggttctcagccacttcctaagaaccctgccatgacgtcatgccggaagaagaaaactgatgatgatgttaccttccttgaagatgtgaaagaacacatcgatgagttcatccacgcgtccatggatgaacacaagacctgcttcaagaagaccattcagaagatgtttggcatgtcgaaggttgtcgcagagcggtccgctgcagcaaaggaagctgaagtcgaaagtgctttgccccttcagaccagtgtgtcccagtag

SEQ ID NO: 663 - protein, 95 aa, Triticum aestivum
MDSGNTQTEGSQPLPKNPAMTSCRKKKTDDDVTFLEDVKEHIDEFIHASMDEHKTCFKKTIQKMFGMSKVVAERSAAAKEAEVESALPLQTSVSQ

SEQ ID NO: 664 - DNA, 288 bp, Triticum aestivum
atgtctggcggtatcaagtctgaagtcccccagccatcttcatctcctcctgtgaagcccacctcaacttcgtgccgaaagaagaactccggcacctcgtttgtcacgcaactgagggatcacttccatgagtttattcatgcctccatgggcgaacacaggacatgcttaacaaacactgtcaagaaattgtttgcgatgtcaaaggctgtcgcagaggggaccgctggggcaaaagaagctggagctgaaagcggtttgccactacagagtgaagtgtcacggtag

SEQ ID NO: 665 - protein, 95 aa, Triticum aestivum
MSGGIKSEVPQPSSSPPVKPTSTSCRKKNSGTSFVTQLRDHFHEFIHASMGEHRTCLTNTVKKLFAMSKAVAEGTAGAKEAGAESGLPLQSEVSR

SEQ ID NO: 666 - DNA, 306 bp, Triticum aestivum
atggatatatcacaaagaaatcttctgaaaggcttaacttctgatgagagtgttgttgctaaggactcttccacgctaggtgtggtgattgttaagcattgcggatatacggcaacagtgaaggtttcgggacgcacaaagaacagcagcgatggcaaacaaaccagtgatatctctgatcatcttgatgaaatacctaacatcgatgtggatgatcatccagatggaggttctaatgccttgaatcctcacagtctaagaataccactggccgaaaattatcaacccagaaatcgctgccagtaa

SEQ ID NO: 667 - protein, 101 aa, Triticum aestivum
MDISQRNLLKGLTSDESVVAKDSSTLGVVIVKHCGYTATVKVSGRTKNSSDGKQTSDISDHLDEIPNIDVDDHPDGGSNALNPHSLRIPLAENYQPRNRCQ

SEQ ID NO: 668 - DNA, 249 bp, Tamarix androssowii
tattgctggtttctttcttgctgccatcccttggtacattggagctctaattctactatgtggcagagttgattacagagaaaaaccaggacttgtggtttgcgcaatagcttccattcttgctgttgttgctatcatctttgttgtgagcgaggggaatcaccatcaccaccactggtgattttggcacagatgacactgattgtatattctgcatttttgtgaagcggctgaccaggtctttcgtta

SEQ ID NO: 669 - protein, 82 aa, Tamarix androssowii
MWRDMCTGPMIVFILESLITKDLVSRFTKMQNIQSVSSVPKSPVVVMVIPLAHNKDDSNNSKNGSYCANHKSWFFSVINSAT

SEQ ID NO: 670 - DNA, 435 bp, Tagetes erecta
atggaaaccgatttggaagaaacaacaaaagcactcaatgagatgaatcaaaacaccaacattctaacccgcgaacttgagatttcaaaaaccaaaatttcccagcttgaagacgaaaaagaagctttgtacaactctctcgacgaacacaaacgggtcattcaagaaacccgagaaaacatggaagatgctcatagcatgattatgaaaatagggaaagagagggaacgtttcgaaaagaaaggaagtaaacttgagaaggaactagcagctgcaaaaggtgagattttaagattaagaaatgtaaacgatacgcgatatgcagaaaccgcagaagaggtgaatagtagcagtggaagtgaagatgaagaaacaagtggtttgaaaaaagttaggagaagaaaaaaggttgtatcacaacagaaagaaacataa

SEQ ID NO: 671 - protein, 144 aa, Tagetes erecta
METDLEETTKALNEMNQNTNILTRELEISKTKISQLEDEKEALYNSLDEHKRVIQETRENMEDAHSMIMKIGKERERFEKKGSKLEKELAAAKGEILRLRNVNDTRYAETAEEVNSSSGSEDEETSGLKKVRRRKKVVSQQKET

SEQ ID NO: 672 - DNA, 255 bp, Taraxacum kok-saghyz
atgctccctcggacagaaaggtcgtacggaaacgatatgatcgtttctagcaagacgtacagtttcgatacaaaagcaatcggcgatcaggttccgacagagtggctagagttcaagcacaggtatggccaccaccaccaccatcaccaccagcaccatgacagagatgaagaattcgtgccaaaggagaagagagaacacaaaggcggtttcatgaggaccattcgcaagtttctgaagcacacttttgactga

SEQ ID NO: 673 - protein, 84 aa, Taraxacum kok-saghyz
MLPRTERSYGNDMIVSSKTYSFDTKAIGDQVPTEWLEFKHRYGHHHHHHHQHHDRDEEFVPKEKREHKGGFMRTIRKFLKHTFD

SEQ ID NO: 674 - DNA, 165 bp, Taraxacum kok-saghyz
atggaattttgtcgaaagaagaagacagacaacgccgctgtggaaacaggtcatctccaatactcgatttctccaaatttctccatgaacagggttgctttcttgggtggacaatgggagactatcgtgccacagaggctgcaccaaaggacacacaggttgtag

SEQ ID NO: 675 - protein, 54 aa, Taraxacum kok-saghyz
MEFCRKKKTDNAAVETGHLQYSISPNFSMNRVAFLGGQWETIVPQRLHQRTHRL

SEQ ID NO: 676 - DNA, 498 bp, Triticum monococcum
  misc_feature (469)..(469): n is a, c, g, or t
atggggacgggatgccttcctctggtaccacagatcatggaactctccgataccgggacgtccatctgcccctccaagagctcgttcttcgcaccggctgtgaacgatgaagggctgtcgccgtgccatctgagcctaactctagcatcgtgctcgatggacctcgacagaggccaagcctccaatgcagacgggagcaccaccatcgacgagggaagcgacaacccaccggaggccaccgcagccgccatgggcggtaacccgaaggcatcagtcgatgccggcacagcggaagcgccgactccacgagaggatacgcgggtggccgccgagccggcagctcctgtcaaggcgaatgacaacttctgggaacagttcttgacggagaggccgggagacgcgagctctggcccgagggatccttccatggacaaggagcaaacggaaggcgggggggaaaggacgacangagaagacacggaacagctgaaactctga

SEQ ID NO: 677 - protein, 165 aa, Triticum monococcum
  misc_feature (157)..(157): Xaa can be any naturally occurring amino acid
MGTGCLPLVPQIMELSDTGTSICPSKSSFFAPAVNDEGLSPCHLSLTLASCSMDLDRGQASNADGSTTIDEGSDNPPEATAAAMGGNPKASVDAGTAEAPTPREDTRVAAEPAAPVKANDNFWEQFLTERPGDASSGPRDPSMDKEQTEGGGERTTXEDTEQLKL

SEQ ID NO: 678 - DNA, 192 bp, Triticum monococcum
atgcggagaggtggatcttcagtcccaaatcaaacgctggcgatgcgcgtgagaagaccgccacattgccccatgctcgacgtccgaaggctaaaagtggtcctcttgggcctcctggaagacttggtggacagtattcatctgtatcttcatccgtctctttgtttgacagtgggagagttgggaatttag

SEQ ID NO: 679 - protein, 63 aa, Triticum monococcum
MRRGGSSVPNQTLAMRVRRPPHCPMLDVRRLKVVLLGLLEDLVDSIHLYLHPSLCLTVGELGI

SEQ ID NO: 680 - DNA, 207 bp, Taraxacum officinale
atggatatgcaacatgagaataccgaaaatacccctgctgctaccaaatactgcaacaaagacgtagaaaatgcaaaagaacacatgaaggcgtttgttgatgcatctttggatgaacacaaggcttgcttcaaggcaacttggcacaagatgattgacaaatttcaacaagtaaaatccgatgcattgaaaggtggaaaagattaa

SEQ ID NO: 681 - protein, 68 aa, Taraxacum officinale
MDMQHENTENTPAATKYCNKDVENAKEHMKAFVDASLDEHKACFKATWHKMIDKFQQVKSDALKGGKD

SEQ ID NO: 682 - DNA, 207 bp, Taraxacum officinale
atggatatgcaacatgagaataccgaaaatacccctgctgctaccaaatactgcaacaaagacgtagaaaatgcaaaagaacacatgaaggcgtttgttgatgcatctttggatgaacacaaggcttgctttaaggcaacttggcacaggatgattgacaaatttcaacaagtaaaatccgatgcattgaaaggtggaaaagattaa

SEQ ID NO: 683 - protein, 68 aa, Taraxacum officinale
MDMQHENTENTPAATKYCNKDVENAKEHMKAFVDASLDEHKACFKATWHRMIDKFQQVKSDALKGGKD

SEQ ID NO: 684 - DNA, 270 bp, Taraxacum officinale
atgacaacagaacaaactcagcttccttctgttccacctccagccatggaatcctgtcgaaagaagaagacagataacgccaccttcctccaggatgtcaaagatcacatcgatgagtttctcgatgcttccatgaatgaacacaaaacctgcttcaaaaagacaatttcaaagatgtttggaatgtcaaaaattgtggcagagagaaacgctgctgagaacaagggagttgagagctcattgccccttcgaactgttgtttctgattag

SEQ ID NO: 685 - protein, 89 aa, Taraxacum officinale
MTTEQTQLPSVPPPAMESCRKKKTDNATFLQDVKDHIDEFLDASMNEHKTCFKKTISKMFGMSKIVAERNAAENKGVESSLPLRTVVSD

SEQ ID NO: 686 - DNA, 501 bp, Thalassiosira pseudonana
agaatggagcaatctttttgggtgttcattctggagaggacgacactacttgtagtggacgcgatgaaaatgaagaaacgtcatgcaatggcaacagtgaaacgacaaatgagacaacagacaaaacaacaatcttgtcatcgttcagagatttggcaatgtactccaagattcctcgtgtcgccgcatctctgctacgattggacgaactgcgtgttgggggagcagaaaatatgaaacctggcagcagacgatctcgtgaacgaagcagaagcataaaggaagggaaacaaaacaacaatggaagagctacctctaccgctgtagacgatgatatcacaattgacgagtccatcaatctacgcatatgtcgagacatattcttgacgaaggacaatgatccgtttgcttgcggttggcatgttgatgatactggattctggccgagcattgcatcagatcccggtgtcaatgcatgggttgcattggacgatatgccgt

SEQ ID NO: 687 - protein, 166 aa, Thalassiosira pseudonana
MSADDDQGHGISSNATHALTPGSDAMLGQNPVSSTCQPQANGSLSFVKNMSRHMRRLMDSSIVISSSTAVEVALPLLFCFPSFMLLLRSRDRLLPGFIFSAPPTRSSSNRSRDAATRGILEYIAKSLNDDKIVVLSVVSFVVSLLPLHDVSSFSSRPLQVVSSSPE

SEQ ID NO: 688 - DNA, 168 bp, Tortula ruralis
atgtcggaactaaaagccgaggtggacggtggccgtcgaagcggaccgtactgcctctgtaagccaccttgtttggcgagacgcaacagagtggtcgccttgcggagcaacgaagctttcccaagtgccgttgaaggcacgcttcctatggaccgccgggaccggtag

SEQ ID NO: 689 - protein, 55 aa, Tortula ruralis
MSELKAEVDGGRRSGPYCLCKPPCLARRNRVVALRSNEAFPSAVEGTLPMDRRDR

SEQ ID NO: 690 - DNA, 261 bp, Triphysaria versicolor
atcaaacacaaacacaatgacgaagaattaaacaagccccagagacgtaacaagaagggattttagagtgctatgtggttcttatagttgcacatacaaacagtttattacaagattaatatttaataatccttgttcccgaaattcttgcaccagatctgtgagggaatcggacgaactggcatatgtggacgttgctcgagctcggcggatttcatggcgatgggaatgcagatcaggacgatgccaaacatggcaaaa

SEQ ID NO: 691 - protein, 86 aa, Triphysaria versicolor
MGGGGDHHHADGAHGADFRAKVWSFSGEPNCRPKHWKRNTAFAMFGIVLICIPIAMKSAELEQRPHMPVRPIPSQIWCKNFGNKDY

SEQ ID NO: 692 - DNA, 279 bp, Triphysaria sp.
ctcaacccctgccctttgaagaggcaaaacactttccacttctttagtctccgagtttatttctgcaacgccttttgacatgctgaacatcttcttgaccggcttctggaaacaagatttgtgttcggccctacaagcgaggatgaattcatcgatgtgatctttcccatcttctaaaaaagttgcactttccctcctctttttccggcccgaaaccattgctggagtagcatctgtggataacggcttcccgttccggatggtttcagtacccattgc

SEQ ID NO: 693 - protein, 92 aa, Triphysaria sp.
MGTETIRNGKPLSTDATPAMVSGRKKRRESATFLEDGKDHIDEFILACRAEHKSCFQKPVKKMFSMSKGVAEINSETKEVESVLPLQRAGVE

SEQ ID NO: 694 - DNA, 279 bp, Triphysaria sp.
aatcccgggcatcgggattattgggttgttctagggccaatggggaaaaaattaaaaggaactttaccccccccctggcgtttgaaaaggcaaaacactttccacttctttagtccccgagtttctttctgcaacagcttttgacatgctgaacatcttcttgaccgtcttctggaaacaggttttgggttcccccaaaaaagcggggaagaattcatcgaggggatctttcccatcttctaaaaaagttgcactttcacccttctttttccggcatga

SEQ ID NO: 695 - protein, 92 aa, Triphysaria sp.
MATENIQNGKPFSPGVTPAMGSCRKKKGESATFLEDGKDPLDEFFPAFLGEPKTCFQKTVKKMFSMSKAVAERNSGTKEVESVLPFQTPGGG

SEQ ID NO: 696 - DNA, 279 bp, Triphysaria sp.
atggctactgaaaacatccagaacgagaagccgttatccacagctgctactccagcaatggcttcatgccggaaaaagaagagtgaaagtgcaacttttttagaagatgtgaaagatcacatcgatgaattcatacacgcttctatggacgaacacaaaacctgtttccagaagacggtcaagaagatgttcagcatgtcaaaagctgttgcagaaagaaactcggagactaaagaagtggaaagtgttttgcctcttcaaacgacagtggctgagtaa

SEQ ID NO: 697 - protein, 92 aa, Triphysaria sp.
MATENIQNEKPLSTAATPAMASCRKKKSESATFLEDVKDHIDEFIHASMDEHKTCFQKTVKKMFSMSKAVAERNSETKEVESVLPLQTTVAE

SEQ ID NO: 698 - DNA, 378 bp, Vitis arizonica x rupestris
gggttgccgggaagggatgaggctgagaaagaagcactttctggtgttagaaacaacaagagagcgtcgcctgacacaagtgatgagtgtggatccaagggaagttctaatggtgatcgtgaaaatgcacctgccacgaaggcacaagttgtagggtggccaccaatccgatcctttcggaaaaatagcttccaaccgaagaagactgaggcggaggctgctggaatgttcgtgaaagtaagcatggatggagctccttacctcagaaagattgatctgaaggtttacaaaggctatccggagctccttcaggctctacagaatatgttcaaattcactataggtgattattcagagagagagggctacaagggatca

SEQ ID NO: 699 - protein, 125 aa, Vitis arizonica x rupestris
MLTFTNIPAASASVFFGWKLFFRKDRIGGHPTTCAFVAGAFSRSPLELPLDPHSSLVSGDALLLFLTPESASFSASSLPGNPSLSSVAFKFRSLSYATAPSIFNLPSKSNTNIFSQIEASLNYLI

SEQ ID NO: 700 - DNA, 462 bp, Vaccinium corymbosum
  misc_feature (5)..(5): n is a, c, g, or t
atgcncgagaaagtcaacaacagggggctttgtgctgttgctcaggctgagtctctccgctacaagttactcggtggacttgctgttcggagggcatgctatggtgttctgaggtttgttatggagagcggggcaaagggatgcgaggtgattgtcagcgggaagctcagggcacagcgtgccaagtctatgaaattcaaggatggttacatgatatcttctggtcagccggtcaatgaatatattgattcagctgtcagacatgttcttcttagacagggtgtacttggtataaaggtcaagatcatgcttgattgggatcccaagggaaagcagggtccaacaacaccacttccggatgttgtcacaatccacacccctaaagaggaagacgaatacttcagatcagcagtgacccaaactgccgaagttgaggccgccatgccgcccatcatggtttaa

SEQ ID NO: 701 - protein, 153 aa, Vaccinium corymbosum
  misc_feature (2)..(2): Xaa can be any naturally occurring amino acid
MXEKVNNRGLCAVAQAESLRYKLLGGLAVRRACYGVLRFVMESGAKGCEVIVSGKLRAQRAKSMKFKDGYMISSGQPVNEYIDSAVRHVLLRQGVLGIKVKIMLDWDPKGKQGPTTPLPDVVTIHTPKEEDEYFRSAVTQTAEVEAAMPPIMV

SEQ ID NO: 702 - DNA, 282 bp, Vitis vinifera
atggaagctcaaaacaatcaacatgaaacacaaccggcatctgctgccaaggccccagttgtgacttcatgtcgaaagaagaagtcagatgacgccacctttttgcaggatgtaaaggatcatattgatgagttcattcatgcttctatggatgaacacaaaacttgctttacgaagactattaagaagatgtttggaatgtcaaaggtggtagctgaaaggaattctaactctgagggagttgaaagttctcttcccctccagacaacaatagccaactag

SEQ ID NO: 703 - protein, 93 aa, Vitis vinifera
MEAQNNQHETQPASAAKAPVVTSCRKKKSDDATFLQDVKDHIDEFIHASMDEHKTCFTKTIKKMFGMSKVVAERNSNSEGVESSLPLQTTIAN

SEQ ID NO: 704 - DNA, 216 bp, Yucca filamentosa
ttgcaaaatccattgggtggaagcaatttttgtcactcatggagcagaaggagccgaccattcttcgagcttacacaaccttgtgtttgagcaaatctggaacgcttcaaaaaaatcaaatattgacatcacttcaaagtgcaggccttcctgccaatgaagataatgctgttgctatgatgcgatatctgaatgcagacacaggtcaatccattt

SEQ ID NO: 705 - protein, 71 aa, Yucca filamentosa
MELELPFPVLCCRTMPSIAPEALEDLEQHLSEQACLLQRYQSAIHGLKIDQELLGWNPYIAPAPLSAEALK

SEQ ID NO: 706 - DNA, 261 bp, Zantedeschia aethiopica
tcaacgtgcgccaggctgggccgaccgttagctccgaccatgagccattccaagtgcccggcatacctcatcggatagaggtaacgatggcccagctcccctccaatttcgccatgaactccgtcatgcaagacttccgggagcaaatccgggaagcggaggcggagacctacggcgtggtggtcaacagcttccaggacctggagcacgggtatgaccagctgtaccaggaggccatggggatgaaggcttggagcgtcg

SEQ ID NO: 707 - protein, 86 aa, Zantedeschia aethiopica
MGRRALMHSSVEFHPHCVKNPPTAGCDRISTCGAQPLMIRHFPLVLSSNPSESHLSTSAVRSSPALITQMKGWFEASSPSPISTSC

SEQ ID NO: 708 - DNA, 240 bp, Zinnia elegans
atgacaacagaaaaaagtgaacaatcaattccttctgcttctgctccagtcatgacatcatgtaggaggaagaaatcagaagatgcaactttcttgcaggatgtgaaaaatcacattgatgagttcatacatgcttctgttgctgaacataaaacatgcttccaaaagaccattttaaaggtttgttttctcaatccaatgcacacccatgacacatgtgagccgtgcgtctgtgtataa

SEQ ID NO: 709 - protein, 79 aa, Zinnia elegans
MTTEKSEQSIPSASAPVMTSCRRKKSEDATFLQDVKNHIDEFIHASVAEHKTCFQKTILKVCFLNPMHTHDTCEPCVCV

SEQ ID NO: 710 - DNA, 288 bp, Zea mays
gctttgtttgcttccgcggatctctctgcaacagccttcgacatcccaaacatcttctgaattgtcttcttaaagcaggtcttgggctcatccatagaggcatgaatgaactcatccatgtggtctttcagatcttcaaggaaggtagcatcatctgttttcttcttccggcatgatgccatagcgggatttttggggacagatggtgctggagcttctgtctgaccattgcttgacgccatcttaagactggaccaagaccaagagccaaaagaaagaaagaaaaca

SEQ ID NO: 711 - protein, 95 aa, Zea mays
MASSNGQTEAPAPSVPKNPAMASCRKKKTDDATFLEDLKDHMDEFIHASMDEPKTCFKKTIQKMFGMSKAVAERSAEANKAEVESALPLQTSVSQ

SEQ ID NO: 712 - DNA, 327 bp, Zea mays
  misc_feature (186)..(186): n is a, c, g, or t
  misc_feature (250)..(250): n is a, c, g, or t
atggcttcaagcgatgatcagacagaagctgcggccccatctgtccccaaaaaccctgctatggcatcatgccggaagaagaaaacggatgatgctaccttcctcgaagatctgaaagaccacatcgatgagttcatccatgcctccatggatgagcacaagaccctgcttaagaagacgatccanaagaatgtttgggatgtcgaaggctgttgcaaagagatccgcggcaaaagcgaaggaagctggnagtggaaagtgctttgccactttcagaacagtggtctccgcagtaaaatttcaccgttggggaatttcttggcttga

SEQ ID NO: 713 - protein, 108 aa, Zea mays
  misc_feature (62)..(62): Xaa can be any naturally occurring amino acid
  misc_feature (84)..(84): Xaa can be any naturally occurring amino acid
MASSDDQTEAAAPSVPKNPAMASCRKKKTDDATFLEDLKDHIDEFIHASMDEHKTLLKKTIXKNVWDVEGCCKEIRGKSEGSWXWKVLCHFQNSGLRSKISPLGNFLA

SEQ ID NO: 714 - DNA, 291 bp, Zea mays
atggcgtcaagcaatggtcagacagaagctccagcaccatctgtccccaaaaatcctgctatggcatcatgccggaagaagaaaacagatgatgctaccttccttgaagatctgaaagaccacatggatgagttcattcacgcctccatggatgagcacaagagctgctttaagaagacaattcagaagatgtttgggatgtcgaaggctgttgcagagagatccgcggcggaagcaaacaaagctgaagttgaaagtgctttgccacttcagaccagtgtctcgcagtag

SEQ ID NO: 715 - protein, 96 aa, Zea mays
MASSNGQTEAPAPSVPKNPAMASCRKKKTDDATFLEDLKDHMDEFIHASMDEHKSCFKKTIQKMFGMSKAVAERSAAEANKAEVESALPLQTSVSQ

SEQ ID NO: 716 - DNA, 366 bp, Zea mays
ggagggatctattcaatccctattagatccacttggagaattaaaatcttcgaacgtagcctaagggatttgatccgtgactgccgaacaaagcctcagtgagattcaactgctgctgctgcgggcttcaccacctccggagtctcatccttgaccgcagggtcgatcttctgcttgcggttgccgaacaccgagccgcgcttctggtcgaagtagctcttgaagcagatccagtgcttttgcgcgggtacctccttgaactggttgaagtagtccttggcgatctccaggaacgtcgcctcctcccccaccgtcttcttgtagcacttctcccgcgcctccggtgccagcagctgcacggtgagg

SEQ ID NO: 717 - protein, 121 aa, Zea mays
MVKDGGVKKVAVAAPAPAPEEATPTGLTATPTLTVQLLAPEAREKCYKKTVGEEATFLEIAKDYFNQFKEVPAQKHWICFKSYFDQKRGSVFGNRKQKIDPAVKDETPEVVKPAAAAVESH

SEQ ID NO: 718 - DNA, 240 bp, Zea mays
atgaccaccgaacctcaaggatcacatcaacatggttcaaaacgtgatttgccttcatgccgaaaaaatgtgcccggcacatcatttgtctcagatttgagagatcacatccacgagttcatcaacgcctcttctgatgaacacatgacatgcttcacaaagactatcaagaagatgttcgggatgtcaatgactgtcgcacataaatcctcgaaagcagaggaagctgggcccgcatga

SEQ ID NO: 719 - protein, 79 aa, Zea mays
MTTEPQGSHQHGSKRDLPSCRKNVPGTSFVSDLRDHIHEFINASSDEHMTCFTKTIKKMFGMSMTVAHKSSKAEEAGPA

SEQ ID NO: 720 - DNA, 291 bp, Zea mays
atggcgtcaaccaatggtcagacagaagctccagcaccatctgtccccaaaaatcccgctatggcatcatgccgaaagaagaaaacagatgatgttaccttccttgaagatctgaaagaccacatggatgagttcattcatgcctccatggatgagcacaagacctgctttaagaagacaattcagaagatgtttgggatgtcgaaggctgttgcagagagatccgcggtggaagcaaacaaagctgaagttgaaagtgctttgccacttcagaccagtgtctcgcagtag

SEQ ID NO: 721 - protein, 96 aa, Zea mays
MASTNGQTEAPAPSVPKNPAMASCRKKKTDDVTFLEDLKDHMDEFIHASMDEHKTCFKKTIQKMFGMSKAVAERSAVEANKAEVESALPLQTSVSQ

SEQ ID NO: 722 - DNA, 279 bp, Zea mays
atgtctggtcatacccaacctgaaggaccacaccaacttgattcaaaacatgctgcaaattcatgccgaaagaatgtacccggtacatcgttcgtctcagatttgagggatcacatccacgagttcatcaatgcctctgcagatgaacaccggacatgcttcacaaagactctcaaaaggatgttcgatatgtcaaagactgtcactgatagatcctctgaagcagaggaagctggacccgaaagtgtcttgccacttcagaccacagtgtcgcggtag

SEQ ID NO: 723 - protein, 92 aa, Zea mays
MSGHTQPEGPHQLDSKHAANSCRKNVPGTSFVSDLRDHIHEFINASADEHRTCFTKTLKRMFDMSKTVTDRSSEAEEAGPESVLPLQTTVSR

SEQ ID NO: 724 - DNA, 240 bp, Zea mays
atgaccaccgaacctcaaggatcacatcaacatggttctaaacgtgatttgcattcatgccgaaaaaatgtacccggcacatcattcgtctcagatttgagagatcacatccacgagttcatcaacgcctcttctgatgaacacatgacatgcttcacaaagactatcaagaagatgttcgggatgtcaaagactgtggcacataaatcgtcggaagcagagcaagctgggccctcatga

SEQ ID NO: 725 - protein, 79 aa, Zea mays
MTTEPQGSHQHGSKRDLHSCRKNVPGTSFVSDLRDHIHEFINASSDEHMTCFTKTIKKMFGMSKTVAHKSSEAEQAGPS

SEQ ID NO: 726 - DNA, 357 bp, Zea mays
tcatataattagatccacttggggaattaaaatcttgaaaccgaacatagcctaagggacaactgctgctgctgcgggcttcaccacctccggagtctcatccttgaccgcagggtcgatcttctgcttgcggttgccgaacaccgagccgcgcttctggacgaagtagctcttgaagcagatccagtgcttttgcgcgggtacctccttgaactggttgaagtagtccttagcgatctccaggaacgtcgcatcctcccccaccgtcttcttatagcacttctcccgcgcctctggtgccggtagcttcacggtgagggtcggcgtcgcggtcaggccggttggcgtcgcttcctc

SEQ ID NO: 727 - protein, 118 aa, Zea mays
MVKDGGVKKVAVAAPAPEEATPTGLTATPTLTVKLPAPEAREKCYKKTVGEDATFLEIAKDYFNQFKEVPAQKHWICFKSYFVQKRGSVFGNRKQKIDPAVKDETPEVVKPAAAAVVP

SEQ ID NO: 728 - DNA, 357 bp, Zea mays
ccctgagacgatcataaccccttcaggtcttgttcgtttgtgccggattggttggtaggaacgatttctaaccggattgtttctctaatttatataaactttaattaactggaacgattccaggtgcaatccggcgaggcctcagtgagattcaactgctgctgctgcgggcttcaccacctccggagtctcatccttgaccgcagggtcgatgatcttctgcttgccgaacaccgagccgcgcttctggtcgaagtagctcttgaagcagatccagtgcttttgcgcgggtacctccttgaactggttgaagtagtccttagcgatctccaggaacgtcgcatcctcccccaccgt

SEQ ID NO: 729 - protein, 118 aa, Zea mays
MVKDGGVKKVAVAAPAPEEATPTGLTATPTLTVKLPAPEAREKCYKKTVGEDATFLEIAKDYFNQFKEVPAQKHWICFKSYFDQKRGSVFGKQKIIDPAVKDETPEVVKPAAAAVESH

SEQ ID NO: 730 - DNA, 321 bp, Zea mays
aggcagtgatgaactcgtggatgtgatccctcaaatctgagacgaacgatgtaccgggtacattctttcggcatgaattcacagcatgttttgaatcaagttggggtggtccttcaggttgggtatgaccagacatcgtcacgtcagactgcaaatgatgcaaacagatgtaagccatagcacgagagaaaccagttcatcgctcaaagggggacttgtttacaaaactacttctcaattgggtttggcagagtgcaatacaatcatacaagaactaggctttcaggagtcacattggtattgtatcctaatgattggggt

SEQ ID NO: 731 - protein, 106 aa, Zea mays
MAYICLHHLQSDVTMSGHTQPEGPPQLDSKHAVNSCRKNVPGTSFVSDLRDHIHEFITASADEHRTCFTKTLKRMFDMSKTVTDRSSEAEEAGPESVLPLQTTVSR

SEQ ID NO: 732 - DNA, 315 bp, Zea mays
atgtctggtcatacccaacctgaaggaccacgccaacttgattcaaaacatgctgtgaattcatgccgaaagaatgtacccggtacatcgttcgtctcagatttgagggatcacatccacgagttcatcactgcctctgcagatgaacaccggacatgcttcacaaagactctcaaaaggatgttcgatatgtcaaagactgtcactgatagatcctctgaagcagaggaagctggacccgaaagcgttttgccacttcagaccacagcgccgcggtacaagcttcgccacttcatattgcctctggagaaatag

SEQ ID NO: 733 - protein, 104 aa, Zea mays
MSGHTQPEGPRQLDSKHAVNSCRKNVPGTSFVSDLRDHIHEFITASADEHRTCFTKTLKRMFDMSKTVTDRSSEAEEAGPESVLPLQTTAPRYKLRHFILPLEK

SEQ ID NO: 734 - DNA, 291 bp, Zea mays
atggcttcaagcgatggtcagacagaagctgcggccccatctgtccccaaaaaccctgctatggcatcatgccggaagaagaaaacagatgatgctaccttcctcgaagatctgaaagaccacatcgatgagttcatccatgcctccatggatgagcacaagacctgctttaagaagacgatccagaagatgtttgggatgtcgaaggctgttgcagagagatccgcggcagaagcgaaggaagctggagttgaaagtgctttgccacttcagaccagtgtctcgcagtag

SEQ ID NO: 735 - protein, 96 aa, Zea mays
MASSDGQTEAAAPSVPKNPAMASCRKKKTDDATFLEDLKDHIDEFIHASMDEHKTCFKKTIQKMFGMSKAVAERSAAEAKEAGVESALPLQTSVSQ

SEQ ID NO: 736 - DNA, 369 bp, Zea mays
tccaagtggattgagtgaaagggagggatccactccctcacagaattagatccacttggggaattaaaatcttgaaaccgaacatagcctaagggacaactgctgctgctgcgggcttcaccacctccggagtctcatccttgaccgcagggtcgatcttctgcttgcggttgccgaacaccgagccgcgcttctggtcgaagtagctcttgaagcagatccagtgcttttgcgcgggtacctccttgaactggttgaagtagtccttggcgatctccaggaacgtcgcctcctcccccaccgtcttcttgtagcacttctcccgcgcctccggtgccagcagctgcacggtgagggtcggcgtcgcgg

SEQ ID NO: 737 - protein, 122 aa, Zea mays
MVKDGGVKKVAVAAPAPAPAPEEATPTGLTATPTLTVQLLAPEAREKCYKKTVGEEATFLEIAKDYFNQFKEVPAQKHWICFKSYFDQKRGSVFGNRKQKIDPAVKDETPEVVKPAAAAVVP

SEQ ID NO: 738 - DNA, 624 bp, Zingiber officinale
aacttgaagagtagtcatacaagaaagctcattacaatgaattcagagcctttagcctttgatctaacaaatcacagctgaaaaatgtggtctagagacgaaagctcagagttgatattctcaagagcatcttgatcaacatggacagtcgagcacatcttaggcagggaacgaaaatacaatgctgctttactttcagtgaattgatatccactcagattattagatctgcgctgaagcatcaaatctgaacaagctgtcaggtcttctttgcttgctgctctgttcaatttactaattagatctgccatgctcgcattcttgtcatagcgtgactgcataatcattttcgatcttttaaactctttgacatcatctgggtcatcatcataggtctcataatcatcaaaaccaagttctccattcagcaattccagtaatttctggtcaataagactttttattctctcccttaaagtatcagttctttgagaatcagattcaagcttcgttttgatatctgagattaatttttcagaaggaatagaaccagaagaaacctgactttgagtttctgcttcttccatgatcggtaatgagaatgtttcctccaacaaactcaca

SEQ ID NO: 739 - protein, 207 aa, Zingiber officinale
MKLREHLEGNVEAENEAFDRYVQNVSLLEETFSLPIMEEAETQSQVSSGSIPSEKLISDIKTKLESDSQRTDTLRERIKSLIDQKLLELLNGELGFDDYETYDDDPDDVKEFKRSKMIMQSRYDKNASMADLISKLNRAASKEDLTACSDLMLQRRSNNLSGYQFTESKAALYFRSLPKMCSTVHVDQDALENINSELSSLDHIFQL

SEQ ID NO: 740 - DNA, 56 bp, Artificial sequence
  primer: prm14300
ggggacaagtttgtacaaaaaagcaggcttaaacaatggaatccattaagacacaa

SEQ ID NO: 741 - DNA, 47 bp, Artificial sequence
  primer: prm14301
ggggaccactttgtacaagaaagctgggtcagaaggcaaacaagctg

SEQ ID NO: 742 - protein, 50 aa, Artificial sequence
  motif 7
  VARIANT (1)..(1): / replace = "His" / replace = "Pro" / replace = "Ser"
  VARIANT (2)..(2): / replace = "Cys"
  VARIANT (3)..(3): / replace = "Arg"
  VARIANT (4)..(4): / replace = "Lys"
  VARIANT (6)..(6): / replace = "Lys"
  VARIANT (7)..(7): / replace = "Ser" / replace = "Thr"
  VARIANT (8)..(8): / replace = "Asp"
  VARIANT (9)..(9): / replace = "Asp"
  VARIANT (10)..(10): / replace = "Ala" / replace = "Val"
  VARIANT (11)..(11): / replace = "Thr"
  VARIANT (13)..(13): / replace = "Leu"
  VARIANT (14)..(14): / replace = "Glu"
  VARIANT (17)..(17): / replace = "Glu"
  VARIANT (20)..(20): / replace = "Met"
  VARIANT (21)..(21): / replace = "Asp"
  VARIANT (25)..(25): / replace = "His"
  VARIANT (28)..(28): / replace = "Ser" / replace = "Met"
  VARIANT (32)..(32): / replace = "Arg" / replace = "Lys"
  VARIANT (33)..(33): / replace = "His"
  VARIANT (36)..(36): / replace = "Lys"
  VARIANT (37)..(37): / replace = "Asn"
  VARIANT (39)..(39): / replace = "Leu"
  VARIANT (40)..(40): / replace = "Gln"
  VARIANT (41)..(41): / replace = "Arg"
  VARIANT (44)..(44): / replace = "Asp"
  VARIANT (47)..(47): / replace = "Met"
  VARIANT (48)..(48): / replace = "Ala" / replace = "Val"
  VARIANT (50)..(50): / replace = "Thr"
NSCRKNVPGTSFVSDLRDHIHEFINASADEHMTCFTKTIKKMFGMSKTVA

SEQ ID NO: 743 - protein, 50 aa, Artificial sequence
  motif X
SCRKKKSDDATFLEDLKDHIDEFIHASMDEHKHCFKNTIQKMFGMSKVVA

SEQ ID NO: 744 - DNA, 2194 bp, Oryza sativa; identical to SEQ ID NO: 247

SEQ ID NO: 745 - DNA, 3109 bp, Artificial sequence
  expression cassette pGOS2::GRP::terminator
aatccgaaaagtttctgcaccgttttcaccccctaactaacaatatagggaacgtgtgctaaatataaaatgagaccttatatatgtagcgctgataactagaactatgcaagaaaaactcatccacctactttagtggcaatcgggctaaataaaaaagagtcgctacactagtttcgttttccttagtaattaagtgggaaaatgaaatcattattgcttagaatatacgttcacatctctgtcatgaagttaaattattcgaggtagccataattgtcatcaaactcttcttgaataaaaaaatctttctagctgaactcaatgggtaaagagagagattttttttaaaaaaatagaatgaagatattctgaacgtattggcaaagatttaaacatataattatataattttatagtttgtgcattcgtcatatcgcacatcattaaggacatgtcttactccatcccaatttttatttagtaattaaagacaattgacttatttttattatttatcttttttcgattagatgcaaggtacttacgcacacactttgtgctcatgtgcatgtgtgagtgcacctcctcaatacacgttcaactagcaacacatctctaatatcactcgcctatttaatacatttaggtagcaatatctgaattcaagcactccaccatcaccagaccacttttaataatatctaaaatacaaaaaataattttacagaatagcatgaaaagtatgaaacgaactatttaggtttttcacatacaaaaaaaaaaagaattttgctcgtgcgcgagcgccaatctcccatattgggcacacaggcaacaacagagtggctgcccacagaacaacccacaaaaaacgatgatctaacggaggacagcaagtccgcaacaaccttttaacagcaggctttgcggccaggagagaggaggagaggcaaagaaaaccaagcatcctcctcctcccatctataaattcctccccccttttcccctctctatataggaggcatccaagccaagaagagggagagcaccaaggacacgcgactagcagaagccgagcgaccgccttcttcgatccatatcttccggtcgagttcttggtcgatctcttccctcctccacctcctcctcacagggtatgtgcccttcggttgttcttggatttattgttctaggttgtgtagtacgggcgttgatgttaggaaaggggatctgtatctgtgatgattcctgttcttggatttgggatagaggggttcttgatgttgcatgttatcggttcggtttgattagtagtatggttttcaatcgtctggagagctctatggaaatgaaatggtttagggtacggaatcttgcgattttgtgagtaccttttgtttgaggtaaaatcagagcaccggtgattttgcttggtgtaataaaagtacggttgtttggtcctcgattctggtagtgatgcttctcgatttgacgaagctatcctttgtttattccctattgaacaaaaataatccaactttgaagacggtcccgttgatgagattgaatgattgattcttaagcctgtccaaaatttcgcagctggcttgtttagatacagtagtccccatcacgaaattcatggaaacagttataatcctcaggaacaggggattccctgttcttccgatttgctttagtcccagaattttttttcccaaatatcttaaaaagtcactttctggttcagttcaatgaattgattgctacaaataatgcttttatagcgttatcctagctgtagttcagttaataggtaatacccctatagtttagtcaggagaagaacttatccgatttctgatctccatttttaattatatgaaatgaactgtagcataagcagtattcatttggattattttttttattagctctcaccccttcattattctgagctgaaagtctggcatgaactgtcctcaattttgttttcaaattcacatcgattatctatgcattatcctcttgtatctacctgtagaagtttctttttggttattccttgactgcttgattacagaaagaaatttatgaagctgtaatcgggatagttatactgcttgttcttatgattcatttcctttgtgcagttcttggtgtagcttgccactttcaccagcaaagttcatttaaatcaactagggatatcacaagtttgtacaaaaaagcaggcttaaacaatggaatccattaagacacaatctcaaggttctgcctcttctgttccaaagaacccagccatgtcctcttgtcggaagaagaagtctgacgacgctacgttcctcgaagatctgaaagaccatatcgacgagttcatccatgcctccatggatgagcacaagcattgcttcaaaaacaccatccagaagatgcttgggatgtcaaaggttgtcgcagagcgttccgctgaagcaaaagaagctgaagtcgagagcgctttgcctcttcagaccagtgtctcgcagtaggatgccatggctgatggcagcttgtttgccttctgacccagctttcttgtacaaagtggtgatatcacaagcccgggcggtcttctagggataacagggtaattatatccctctagatcacaagcccgggcggtcttctacgatgattgagtaataatgtgtcacgcatcaccatgggtggcagtgtcagtgtgagcaatgacctgaatgaacaattgaaatgaaaagaaaaaaagtactccatctgttccaaattaaaattcattttaaccttttaataggtttatacaataattgatatatgttttctgtatatgtctaatttgttatcatccgggcggtcttctagggataacagggtaattatatccctctagacaacacacaacaaataagagaaaaaacaaataatattaatttgagaatgaacaaaaggaccatatcattcattaactcttctccatccatttccatttcacagttcgatagcgaaaaccgaataaaaaacacagtaaattacaagcacaacaaatggtacaagaaaaacagttttcccaatgccataatactcgaac

SEQ ID NO: 746 - DNA, 342 bp, Solanum lycopersicum
atgtgtcatgcaatttcagatcatttagagtcatttcaaccttcatgttacactgacctagtccacaagtcacaaacatctaaaacaaacaagatacatgtgctcaagctaagaagaaggaatggtgaaagattgtccaacgaagcaaagaaaagggcaaagttaagtaaattgaagaaaataatgaagatgaagaatttgaagctctacgaagagaacaaaatcattattgaagagaatgaaaagttacgcaaaagagctcttcttcttcatcaagaaaacaaagacttattcactcaaattattcaacaaatttctcaaccctctaataatcacaattag

SEQ ID NO: 747 - protein, 113 aa, Solanum lycopersicum
MCHAISDHLESFQPSCYTDLVHKSQTSKTNKIHVLKLRRRNGERLSNEAKKRAKLSKLKKIMKMKNLKLYEENKIIIEENEKLRKRALLLHQENKDLFTQIIQQISQPSNNHN

SEQ ID NO: 748 - DNA, 339 bp, Populus trichocarpa
atgtgtactggtacttgttcgaaactgagcccatgcagtcccttgtatattgctcttagcaatcaacagccatcaaaaggacacaaccttcgatatcatagactcaaccgaaggagaaggttgtcaaaagggaagagggtagcactggtactggtcaagaaagagatggaaatcaagaacttgaaactgtacatggagaacaaaagcatcatagaagagaatgagaagctgagaaaggaagcatttcttctacaccaggaaaatcaagctttgctttatcagctccaaaagaagcgctctaatcctcgccatgaccacttggctcacagcaacaactaa

SEQ ID NO: 749 - protein, 112 aa, Populus trichocarpa
MCTGTCSKLSPCSPLYIALSNQQPSKGHNLRYHRLNRRRRLSKGKRVALVLVKKEMEIKNLKLYMENKSIIEENEKLRKEAFLLHQENQALLYQLQKKRSNPRHDHLAHSNN

SEQ ID NO: 750 - DNA, 315 bp, Arachis hypogaea
atgtgctattcctcttcaaaacataccctaaatgttcctcttgtttcttcatgttcatcaaagacacaacatcttcagttgagcttccttagaagaaggagagcacaattgaaagaagcaagagagaggagaaagataactgtggtgaagacacagattaagatgagaaacttgaaactttacaaagagaaccaaaacttattaaatgagaatgagaggttgagaaaccaagccatgcttctttacaaagagaatcaagacctcttatctaagctccaaaagaagccttcacaacaaaataacaagaataattga

SEQ ID NO: 751 - protein, 104 aa, Arachis hypogaea
MCYSSSKHTLNVPLVSSCSSKTQHLQLSFLRRRRAQLKEARERRKITVVKTQIKMRNLKLYKENQNLLNENERLRNQAMLLYKENQDLLSKLQKKPSQQNNKNN

SEQ ID NO: 752 - DNA, 279 bp, Arabidopsis lyrata
atgtgtttgagttcttcagaaccattttcagacacacccacgagattagtattgtacctcaaaacacaaagtcacgttcgtattcctcgtctctccaggaggagacggatgtggcgggaagaaaagaagatggagatgatcaatctaaagctttacgtggagaatcaaaacatcataagagagaacgagaaacttaggaagaaagctcttcttcttcaccaagaaaacaaagctctcttctctctgcttcagaccaaaaaactctcctctgttccataa

SEQ ID NO: 753 - protein, 92 aa, Arabidopsis lyrata
MCLSSSEPFSDTPTRLVLYLKTQSHVRIPRLSRRRRMWREEKKMEMINLKLYVENQNIIRENEKLRKKALLLHQENKALFSLLQTKKLSSVP

SEQ ID NO: 754 - DNA, 318 bp, Arabidopsis lyrata
atgtgtctgacatcttcagagccaccattcccagacactcacacaccaaccatgagaccatcttcgtaccacaacaaacataaatctaagacacaatcccatcttcgtatccttaatctcaccaggagaagaagattactgaaggaacagaaggtgatggagatgagaaacttgaagcttttcgtagcgaatcaaagcatcatgcgagagaatgaagctttaaaaaagaaagctcttcttctccaccaagaaaacaatgctctgtttgctctgcttcatccaaaaccctcccctgttgccacctccttgcttctgtga

SEQ ID NO: 755 - protein, 105 aa, Arabidopsis lyrata
MCLTSSEPPFPDTHTPTMRPSSYHNKHKSKTQSHLRILNLTRRRRLLKEQKVMEMRNLKLFVANQSIMRENEALKKKALLLHQENNALFALLHPKPSPVATSLLL

SEQ ID NO: 756 - DNA, 411 bp, Arabidopsis thaliana
atgcaaagggaacacaaaactcacaacaaactttctttcatctatataacgcctctctatatctcacccattaatcaaacacgtctcacttatctctcttcttcatttcttctctcttcaagctccaagatgtgtttaagttcttcagaaacattttcagacacacccacgagattagttttatacctcaaaacacaaagtcacgttcgtatccctcgtctctccaggaggagacggatgtggcgggaagagaaaaagatggagatgatcaatctaaagctttacgtggagaatcaaaacatcataagagagaacgagaaacttaagaagaaagctcttcttcttcaccaagaaaacaaaactctcttctctctgcttcagaccaaaaaactctcctctgtccataaataa

SEQ ID NO: 757 - protein, 136 aa, Arabidopsis thaliana
MQREHKTHNKLSFIYITPLYISPINQTRLTYLSSSFLLSSSSKMCLSSSETFSDTPTRLVLYLKTQSHVRIPRLSRRRRMWREEKKMEMINLKLYVENQNIIRENEKLKKKALLLHQENKTLFSLLQTKKLSSVHK

SEQ ID NO: 758 - DNA, 318 bp, Arabidopsis thaliana
atgtgtctgacaacttcagagccaccattcccagacactgacacaccaactatgagatctgcttcgtaccatatcaaacataaatctaagacacaaacccatcttcgtatccttaatctcaccaggaggagaagattactgaaggaacagaaggagatggagatgaggaacttgaagcttttcgtagagaatcaaagcatcatacgagagaatgaagctttaaaaaagaaagctcttcttctccaccatgaaaacaatgctctgtttgctctgcttcacccaaaatactcccctgtttcaacctccttgcttcagtga

SEQ ID NO: 759 - protein, 105 aa, Arabidopsis thaliana
MCLTTSEPPFPDTDTPTMRSASYHIKHKSKTQTHLRILNLTRRRRLLKEQKEMEMRNLKLFVENQSIIRENEALKKKALLLHHENNALFALLHPKYSPVSTSLLQ

SEQ ID NO: 760 - DNA, 285 bp, Amborella trichopoda
atgtgtttctgcaacttcttgagccccccatcttctctcaatccctcattcgcgaagcttcgcataaagaaacccaaggtccgaattcttataagaaggaggttcgaagaggcttcggagatggagatttcgaacttggaactttacctgcaaaattggtgcataattgaagagaacgagaggctgaggaagaaggccttggtacttgaccaagagaacagggctttgctttctgaattgaacaagaaattctctggtttcaataaagtcgtcgccaaaccatag

SEQ ID NO: 761 - protein, 94 aa, Amborella trichopoda
MCFCNFLSPPSSLNPSFAKLRIKKPKVRILIRRRFEEASEMEISNLELYLQNWCIIEENERLRKKALVLDQENRALLSELNKKFSGFNKVVAKP

SEQ ID NO: 762 - DNA, 279 bp, Brassica napus
atgtgtttgagttcttcacaaccattctcagacacacccacgagattagttttgtacctcaaaacacaaacccacgttcgtatccctcgcctatccaggaggagaaggatgtggaggaaagaaaaagagatggagatgaaaaatataaggctttacatggagaaccaatacatcatacaagagaatgagaaactcaagaagaaagctcttcttcttcatcaagaaaacaaagctctcttctctcagcttcagaccaaaaatgtttcacatgttccttaa

SEQ ID NO: 763 - protein, 92 aa, Brassica napus
MCLSSSQPFSDTPTRLVLYLKTQTHVRIPRLSRRRRMWRKEKEMEMKNIRLYMENQYIIQENEKLKKKALLLHQENKALFSQLQTKNVSHVP

SEQ ID NO: 764 - DNA, 330 bp, Capsicum annuum
atgtgccatggagtatcagatttagagtcatttcagacttcttgctacacagatctagtccataggccagacccagagccatctaaaacagccaaggcacatgtggtcagtctaagaagaaggaatggtgagagattgtcaaaggaaagggcaaagttgaggaaattgaagaaaataatgaagatgaagaacttgaagctctacatggaaaacaaaaccattattgaagagaatgaaaaattgagaaagcaagctcttcttcttcatcaagaaaacaaagccttgttctctcagatgctaattcaacaagtttctcaaaaccccaattaa

SEQ ID NO: 765 - protein, 109 aa, Capsicum annuum
MCHGVSDLESFQTSCYTDLVHRPDPEPSKTAKAHVVSLRRRNGERLSKERAKLRKLKKIMKMKNLKLYMENKTIIEENEKLRKQALLLHQENKALFSQMLIQQVSQNPN

SEQ ID NO: 766 - DNA, 336 bp, Cichorium intybus
atgtgtctttgtacctccaaaggctatgatccttcacatctcactaccggagaacaactcaagagatcaaactttgactttcaccatctacaaaggaaaagaattatgggtatgaaaaatccacgaaacaaaacaagggtcttgtttgtaatgttgaaaaggaagatggcaatgaagaatttgaagttgtacattcaaaaccaatgcataattgaagagaatgagaggcttagaagaaaagcacttcttctccatcaagaaaaccaagtattgctttgtcaactccaaaacgtcaaaattaacccacaaaacatcaacaccgatgtcatagtctag

SEQ ID NO: 767 - protein, 111 aa, Cichorium intybus
MCLCTSKGYDPSHLTTGEQLKRSNFDFHHLQRKRIMGMKNPRNKTRVLFVMLKRKMAMKNLKLYIQNQCIIEENERLRRKALLLHQENQVLLCQLQNVKINPQNINTDVIV

SEQ ID NO: 768 - DNA, 351 bp, Cucumis melo
atgtgccattcttcccgattcatcctcactccttcctatttagcctgccgccaccatcgacggcggcgccccgttcgagtttacagcctcttgagaaggatgagattcgcaacggaagaagcgaattcggccggcgttaaggtagaaatggagatcaagaatttgaaactgtatatggagaatcaaagcattattgaagagaacgagagattgagaaagaaagcgtttcttcttcacaaagagaatcaggttttgttatctcagcttcagaatttctccgactataaaccaccgcagtctagctccgatttgagtgcctgcagttgggaaagtaaacaaaatcatctgtag

SEQ ID NO: 769 - protein, 116 aa, Cucumis melo
MCHSSRFILTPSYLACRHHRRRRPVRVYSLLRRMRFATEEANSAGVKVEMEIKNLKLYMENQSIIEENERLRKKAFLLHKENQVLLSQLQNFSDYKPPQSSSDLSACSWESKQNHL

SEQ ID NO: 770 - DNA, 303 bp, Citrus sinensis
atgactccatctctatgcagtggttgcttattgcattttgcttatagacgcccatgtcgacgacacaattttcgggtacgccgcttaaatagggggagaagattatcatcagcattaaacgagacgatggagctaaagagaaagaacctgaagctgtacatggagaaccagagcctcatcaaagagaatgaaaagctgagaaacaaagctcttcttcttcaccaagagaatcaggcgttgttatctcagtcactattcaacttacgattaattagttcgatccctcttccctttttcccctaa

SEQ ID NO: 771 - protein, 100 aa, Citrus sinensis
MTPSLCSGCLLHFAYRRPCRRHNFRVRRLNRGRRLSSALNETMELKRKNLKLYMENQSLIKENEKLRNKALLLHQENQALLSQSLFNLRLISSIPLPFFP

SEQ ID NO: 772 - DNA, 231 bp, Carthamus tinctorius
atgggtaagaaaaatccacgaaacaagaagaaggtcttgtttttcgtgttgaaaagaaagatggcaatgaagaacttgaagttgtatatgcaaaaccaatgcatgattgaagaaaatgagaagcttagaagaaaagcacttgttcttcatcaagaaaaccaaatcttgttttctcaactccaaaatgccaaaattaaccaacacaatatcaacaataatgccatagtctag

SEQ ID NO: 773 - protein, 76 aa, Carthamus tinctorius
MGKKNPRNKKKVLFFVLKRKMAMKNLKLYMQNQCMIEENEKLRRKALVLHQENQILFSQLQNAKINQHNINNNAIV

SEQ ID NO: 774 - DNA, 303 bp, Eragrostis tef
atgtgctccggctcctggaacagcaagaaacaccagccttttctcgtcctcaaacagcagcggaagcctcatgtctcggttgttatcaggaggaagaggttgagactgaggtggcgagctggggcagagaccatggagatggtgaacttgaagctctacctcgagaaccggtgcatcatcgcggagaacgagaggctccgggagaaggccaacgcgctccgccgcgagaacctcgcgctgagggagaacctgtccaagacggtggccgctgagctgccggcggcaggagcaagagctgcctga

SEQ ID NO: 775 - protein, 100 aa, Eragrostis tef
MCSGSWNSKKHQPFLVLKQQRKPHVSVVIRRKRLRLRWRAGAETMEMVNLKLYLENRCIIAENERLREKANALRRENLALRENLSKTVAAELPAAGARAA

SEQ ID NO: 776 - DNA, 327 bp, Euphorbia tirucalli
atgtgttttattacctcatcttcaacactctgcccatacagttctttaatccttgctgctgccaatacgaaaccatcaagaggctttaatgtccaatatcgccggctaagcaggagaagaagagtatcaagagaagcaaagaagaaaaacaaaatgggttcagtaaatatacaaaatgagatgaaaataaagaacttgaagctttatatggagaacaaaagcatcattcaagagaatgagaaactaaggaagaaagctcttctccttcaccaagagaaccaagctttgctctttcagctcaaaaacaatttctctaagaatttttga

SEQ ID NO: 777 - protein, 108 aa, Euphorbia tirucalli
MCFITSSSTLCPYSSLILAAANTKPSRGFNVQYRRLSRRRRVSREAKKKNKMGSVNIQNEMKIKNLKLYMENKSIIQENEKLRKKALLLHQENQALLFQLKNNFSKNF

SEQ ID NO: 778 - DNA, 297 bp, Gossypium hirsutum
atgttggttaactcttcttcatgctgccgaaaacgtcagtccaagctaagacataacgttcgtgttccaaggctcaacaggttgagaagattaaggacaaagaagatgggggccgtcgggattaaaacagatatggaaataaaaaacttgaaactgtacatggagaatcagattatcatacaagagaacaagaagctgaggaagaaagcacttcttcttcaccaggagaaccaaaccctgttggctcagctacagaagaagttgtgtaatccgccgaatcagtccttaaaaacctag

SEQ ID NO: 779 - protein, 98 aa, Gossypium hirsutum
MLVNSSSCCRKRQSKLRHNVRVPRLNRLRRLRTKKMGAVGIKTDMEIKNLKLYMENQIIIQENKKLRKKALLLHQENQTLLAQLQKKLCNPPNQSLKT

SEQ ID NO: 780 - DNA, 330 bp, Gossypium hirsutum
atgtgtaaaaacatggattggagtccatacccatctcatcccaccattgcttcttcaaagagaaggcatagattaaaacattctaaggttcaagtctacaggctttccaggaaaagatgggaagaaaatatgaagaaagacatggacctaatgaacttgaagctgtacttggagaaccaaagtatcattgaagagaatgagaagttaaggaagaaagccagtcttctccatcaagagaacttagctttaatgtctgagtaccagaagaagtttcctcatttagatcgtttttcaaccacccttttgcttcttctgcaacaaaaacactga

SEQ ID NO: 781 - protein, 109 aa, Gossypium hirsutum
MCKNMDWSPYPSHPTIASSKRRHRLKHSKVQVYRLSRKRWEENMKKDMDLMNLKLYLENQSIIEENEKLRKKASLLHQENLALMSEYQKKFPHLDRFSTTLLLLLQQKH

SEQ ID NO: 782 - DNA, 324 bp, Gossypium hirsutum
atgtgtaacaacatgaattggagcccatctcatcccatcttagtttcttcaaagagaaggcatagatcaaaacaaagtaaagttcaaatctacaggctttccaggaaaaggtgtgaagaagaagatgtgaagaaagacatggaactaatgaacttgaagctgcatttggagaatcgaagcattatagaagagaatgagaagttaaggaagagagctaatcttctacatcaagagaacttggctttaatgtctgagcttcagaacaagtttcctcatttggatcgtttttccactacccttttggttcttctgcaaaaacactga

SEQ ID NO: 783 - protein, 107 aa, Gossypium hirsutum
MCNNMNWSPSHPILVSSKRRHRSKQSKVQIYRLSRKRCEEEDVKKDMELMNLKLHLENRSIIEENEKLRKRANLLHQENLALMSELQNKFPHLDRFSTTLLVLLQKH

SEQ ID NO: 784 - DNA, 324 bp, Gerbera hybrid cultivar
atgtgcacaaacaaaagcaacatctcaaaatgcatctcatcaacttctctcaattttcgtacccataaaaacaaatttaaacgggctctaattcggatacagattcggattcataggttcaaacgggcgcacaagtttatcgatgaaaagatcaaacgagagatggagctcaagaacttgaagttgtacatggagaacatgagtatcttgaaagagaacgagaaattgaggaagaaagcgagcctactccatcaagaaaacctcgttttactgtcagagctcaagaaaaagtcgtcacctttacaagaatctttgagttcatga

SEQ ID NO: 785 - protein, 107 aa, Gerbera hybrid cultivar
MCTNKSNISKCISSTSLNFRTHKNKFKRALIRIQIRIHRFKRAHKFIDEKIKREMELKNLKLYMENMSILKENEKLRKKASLLHQENLVLLSELKKKSSPLQESLSS

SEQ ID NO: 786 - DNA, 339 bp, Glycine max
atgtgttctttctcttcagaacagttaccttatctttttcttggttttgcccttcaccctccatggccatccaagagacagcaccagcaccttcggttgaacatccataaaagaaggagagcacaattgcaagaagcaagacggaggaagaggatgatcatcttgaagcttacagaaataaagatgagaaacttgaagttgtacatggagaaccaaagcatcatagaggagaatcagaagttgaggaagcaagcaatgcttcttcacaaagagaatgatgtcctcttatttcagcttcaaaagaagctttccgaacaaaacaacagcaaaaccaattaa

SEQ ID NO: 787 - protein, 112 aa, Glycine max
MCSFSSEQLPYLFLGFALHPPWPSKRQHQHLRLNIHKRRRAQLQEARRRKRMIILKLTEIKMRNLKLYMENQSIIEENQKLRKQAMLLHKENDVLLFQLQKKLSEQNNSKTN

SEQ ID NO: 788 - DNA, 336 bp, Glycine max
atgtgctctatctcttcaaaacagaccctttatttggttcttcctcgtccatggccatctaaaagacaccaccacaaccacaggcaccttcggttgggcatgctcaacagaaggagggcacacttgaaagaagcaagacaaaggaaaaggattgttgtggtgaaatcagagattcagatgaagaacttgaaactgtacatggagaaccaaaccatcatagaggagaatgagaagttgaggaaacaagccatgcttctgcacaaagagaatcaggcactcttgtctcagctccaaaagaagctttcagaacaaaacaacaataccaacaataactag

SEQ ID NO: 789 - protein, 111 aa, Glycine max
MCSISSKQTLYLVLPRPWPSKRHHHNHRHLRLGMLNRRRAHLKEARQRKRIVVVKSEIQMKNLKLYMENQTIIEENEKLRKQAMLLHKENQALLSQLQKKLSEQNNNTNNN

SEQ ID NO: 790 - DNA, 333 bp, Glycine max
atgtgctctttctcttcaaaacaaaccctttatttggcacttcctcgtccatggacatctaaaagacaccaccacagtcacaggcaccttcggttgggcatgctcaacagaaggagggcaaacttgaaagaagccagacaaaggaaaaggattgttgtgaaatcagagattcagatgaagaacttgaagttgtacatggagaaccaaaccatcatagaggagaatgagaagttgaggaaacaagccatgcttctgcacaaagagaatcaggccctctcgtctcagctccaaaagaagctttctggacaaaacaacaataccaacaataactag

SEQ ID NO: 791 - protein, 110 aa, Glycine max
MCSFSSKQTLYLALPRPWTSKRHHHSHRHLRLGMLNRRRANLKEARQRKRIVVKSEIQMKNLKLYMENQTIIEENEKLRKQAMLLHKENQALSSQLQKKLSGQNNNTNNN

SEQ ID NO: 792 - DNA, 234 bp, Glycine max
actaagatgcaacctaaaaaaaaaaagaagaagctaagtcaacaagatatagggctaacataacatttgagaaaaagatcattgacacagaccctttaatttctcctaccccttgccacactatgacacaaataaactgtttatatattaattagctaatagctagttattgttggtattgttgttttgtcctgaaagcttcttttggagctgagacgagagggcctgattctc

SEQ ID NO: 793 - protein, 77 aa, Glycine max
  misc_feature (36)..(36): Xaa can be any naturally occurring amino acid
MLTRRRAHLKEPRQRKRIVVKSEIQMKNLKLYMENXPIIEENEKLRKQAMLLHKENQALSSQLQKKLSGQNNNTNNN

SEQ ID NO: 794 - DNA, 351 bp, Glycine max
atgtgctctttctcttcagaacagtcctcaccatatgatgatcttcctcttgttcaccctccatggccatccaagagacagccccagcaccttcggttcagcctccataaaagaaggagagcacaattgcaagaagcaagacggaggaaaaggatgatcatattgaagactgaaataaagatgagaaacttgaagttgtacatggagaaccaaagcatcatagaggagaatgagaagttaaggaagcaagcagtgcttcttcacaaagagaatgaggccctcttatttcaacttcaaaagaagctttccgaacaaaataacagcaaaaccaatcaaatagctgttagctag

SEQ ID NO: 795 - protein, 116 aa, Glycine max
MCSFSSEQSSPYDDLPLVHPPWPSKRQPQHLRFSLHKRRRAQLQEARRRKRMIILKTEIKMRNLKLYMENQSIIEENEKLRKQAVLLHKENEALLFQLQKKLSEQNNSKTNQIAVS

SEQ ID NO: 796 - DNA, 336 bp, Glycine max
atgtgctctttctcttcaaaactgaccctttatttggttcttcctcgtccatggccatctaaaagacaccaccacaaccacaggcaccttcggttgggcatgctcaacagaaggagggcacacttgaaagaagcaagacaaaggaaaaggattgttgtggtgaaatcagagattcagatgaagaacttgaaactgtacatggagaaccaaaccatcatagaggagaatgagaagttgaggaaacaagccatgcttctgcacaaagagaatcaggcactcttgtctcagctcctaaagaagctttctgaacaaaactactataccaactataactag

SEQ ID NO: 797 - protein, 111 aa, Glycine max
MCSFSSKLTLYLVLPRPWPSKRHHHNHRHLRLGMLNRRRAHLKEARQRKRIVVVKSEIQMKNLKLYMENQTIIEENEKLRKQAMLLHKENQALLSQLLKKLSEQNYYTNYN

SEQ ID NO: 798 - DNA, 333 bp, Glycine max
atgtgctctttctcttcaaaacagaccctttatttggcacttcctcgtccatggacatctaagagacaccaccacagtcacaggcaccttcggttgggcatgctcaacagaaggagggcacacttgaaagaagcaagacaaaggaaaaggattgttgtgaaatcagagattcagatgaagaacttgaagttgtacatggagaaccaaaccatcatagaggagaatgagaagttgaggaaacaagccatgcttctgcacaaagagaatcaggccctctcgtctcagctccaaaagaagctttcaggacaaaacaacaataccaacaataactag

SEQ ID NO: 799 - protein, 110 aa, Glycine max
MCSFSSKQTLYLALPRPWTSKRHHHSHRHLRLGMLNRRRAHLKEARQRKRIVVKSEIQMKNLKLYMENQTIIEENEKLRKQAMLLHKENQALSSQLQKKLSGQNNNTNNN

SEQ ID NO: 800 - DNA, 351 bp, Lactuca perennis
atgtgtcttggcacccccaaagaaaacatatatcgtctttcatatctcacaactcaccaagaacaactcaagagatcatcaagctttcacttccaccatctacaaagcaggaaaagagttatgggtatgaagaattcacgaaacaaaacaagggtcttgtttgtaatgctgaaaaggaagatggcaatgaagaacttgaagttgtacatgcaaaaccaattcataattgaagagaatgagaagcttagaagaaaagcacttcttctccatcaagaaaaccaagtcttgttttatcaactccaaaatgtcaaaattaacaaacacaacattgacactgatgtcgtagtctag

SEQ ID NO: 801 - protein, 116 aa, Lactuca perennis
MCLGTPKENIYRLSYLTTHQEQLKRSSSFHFHHLQSRKRVMGMKNSRNKTRVLFVMLKRKMAMKNLKLYMQNQFIIEENEKLRRKALLLHQENQVLFYQLQNVKINKHNIDTDVVV

SEQ ID NO: 802 - DNA, 294 bp, Lactuca sativa
atgtacacatataactcaaaatgtgtctcatcgcctcttcttagttcccctacccggaaaatgaagtcaaatcgtgttcgaaaacacatacaagttcgacttcataggtttaacagacgcatcaatgaaaagatgaaacaggagatggagttcaaaaacttgaagttgtatatggagaacatgaacatcttgaaagaaaacgcagaactgtggaagaaagcaatccaactccgtgaagaaaatactattttactgtctaagcttgtgaaaaatatcaagccttcgggttcgtga

SEQ ID NO: 803 - protein, 97 aa, Lactuca sativa
MYTYNSKCVSSPLLSSPTRKMKSNRVRKHIQVRLHRFNRRINEKMKQEMEFKNLKLYMENMNILKENAELWKKAIQLREENTILLSKLVKNIKPSGS

SEQ ID NO: 804 - DNA, 417 bp, Lactuca serriola
atgtgtactagcaataccacagaatgcatgtcaccaccttcatactatttcctcaaccaaaaaacaaaatcaaagcaagccaagtttcgtatgaggaatcaggttcgaatacataggcttaacaggtacatatatatattatgctttttgtgggtcttattaacgtttatcttctttctatcaataggattaataatcttatttgagtgtggttttctttcttttgtgtgttttagggttgataagtttattgaagaaaagatcaagcaagagatggagttgaagaacttgaagttgtacatggagaacatgagcattttggaagagaatgagaggctgaggaacaaagccaccatgcttcatcaagaaaatcttgctttattatctcttttggagaacaaaaggttcaacctttga

SEQ ID NO: 805 - protein, 138 aa, Lactuca serriola
MCTSNTTECMSPPSYYFLNQKTKSKQAKFRMRNQVRIHRLNRYIYILCFLWVLLTFIFFLSIGLIILFECGFLSFVCFRVDKFIEEKIKQEMELKNLKLYMENMSILEENERLRNKATMLHQENLALLSLLENKRFNL

SEQ ID NO: 806 - DNA, 306 bp, Lactuca serriola
atgtgtactagcaataccacagaatgcatgtcaccaccttcatactatttcctcaaccaaaaaacaaaatcaaagcaagccaagtttcgtatgaggaatcaggttcgaatacataggcttaacagggttgataagtttattgaagaaaagatcaagcaagagatggagttgaagaacttgaagttgtacatggagaacatgagcattttggaagagaatgagaggctgaggaacaaagccaccatgcttcatcaagaaaatcttgctttattatctcttttggagaacaaaaggttcaacctttga

SEQ ID NO: 807 - protein, 101 aa, Lactuca serriola
MCTSNTTECMSPPSYYFLNQKTKSKQAKFRMRNQVRIHRLNRVDKFIEEKIKQEMELKNLKLYMENMSILEENERLRNKATMLHQENLALLSLLENKRFNL

SEQ ID NO: 808 - DNA, 294 bp, Lactuca virosa
atgtgcacatataactcaaaatgtgtctcatcgcctcttcctagttcccctatccggaaaatgaagtcaaatcgtcttcgaaaacacatacaagttcgacttcataggtttaacagacgcatcaatgaaaagatgaaacaggagatggagttcaaaaacttgaagttgtatatggagaacatgaacatcttgaaagaaaacgcagaactgtggaagaaagcaatccaactccgtgaagaaaatactgttttactgtctgagctcgcgaaaaaaatcaagccttcgggttcgtga

SEQ ID NO: 809 - protein, 97 aa, Lactuca virosa
MCTYNSKCVSSPLPSSPIRKMKSNRLRKHIQVRLHRFNRRINEKMKQEMEFKNLKLYMENMNILKENAELWKKAIQLREENTVLLSELAKKIKPSGS

SEQ ID NO: 810 - DNA, 339 bp, Malus x domestica
atgtgtttgaactcagaattgtctccgtctagtcctctatactcttcttttcaccttcgaaggccatcaaagcaacacagctttcgagttcgccgcctaattaacaggaactggaagagaaaaccagctggaccagcagcaaaagaggcagagaccggaggggcaaaggtagagatggaaatgaagaacttgaagctgtatatggagaaccagagcattatagaagagaatactaagctgaggagaaaagcacttcttcttgtccaagaaaaccaagccttgttttcacagctccaacaaaagcagctttttctcaacaaaacaacagcagcagtataa

SEQ ID NO: 811 - protein, 112 aa, Malus x domestica
MCLNSELSPSSPLYSSFHLRRPSKQHSFRVRRLINRNWKRKPAGPAAKEAETGGAKVEMEMKNLKLYMENQSIIEENTKLRRKALLLVQENQALFSQLQQKQLFLNKTTAAV

SEQ ID NO: 812 - DNA, 333 bp, Nicotiana tabacum
atgtgccatgcatgcgcaacatcacagttagagtcatttcagccctcatgctacactgatttccacagtccacagttgtctaaaacagccaagatacatgtgctcaagctaagaaggaatggtggcagattgtcaaaggaagcaaaggaaaggacaaggttgaggaaattgaagaaagcaatgaagatgaagaacttgaagctctacaaagagaacaaaaccataattgaagagaatgaaaggttgcgcaaaaaagctcttcttcttcatcaagaaaacaaagccttgttctctaagcttcaacaagtttttcaatcacccaaccacgactaa

SEQ ID NO: 813 - protein, 110 aa, Nicotiana tabacum
MCHACATSQLESFQPSCYTDFHSPQLSKTAKIHVLKLRRNGGRLSKEAKERTRLRKLKKAMKMKNLKLYKENKTIIEENERLRKKALLLHQENKALFSKLQQVFQSPNHD

SEQ ID NO: 814 - DNA, 351 bp, Oryza sativa
atgtgttctggctcctggaacagcaagaataagatctatctgtctttggttgtattcaggcaggacaatcaacagcagcagcagagaaagcagccggctcatgcccccatggctctcaggaggaagaggctaaggctgaggaggaggagagagaccatgaggagatctgatggaatggagatggagatggtgaacctgaagctctacctggagaacaggtgcatcctggaggagaacgagaggctgagggagaaggccagcgcgctccaccgggagaacctcgcgctgcgcgccgacctgcgcaacacatcgtcgccggcgacgacggcggccgccgcctccagctgctga

SEQ ID NO: 815 - protein, 116 aa, Oryza sativa
MCSGSWNSKNKIYLSLVVFRQDNQQQQQRKQPAHAPMALRRKRLRLRRRRETMRRSDGMEMEMVNLKLYLENRCILEENERLREKASALHRENLALRADLRNTSSPATTAAAASSC

SEQ ID NO: 816 - DNA, 351 bp, Oryza sativa; identical to SEQ ID NO: 814

SEQ ID NO: 817 - protein, 116 aa, Oryza sativa; identical to SEQ ID NO: 815

SEQ ID NO: 818 - DNA, 399 bp, Picea abies
atgccgttagataacatttggacagtctcgagttcgagtcgccgaagacccgcgcaaaggctttggtttggccgcgagcaggttgttttgggccaatttctccagcggcgttcgttctccataaagcaacgtattaaaaggcgtccgattttgtactctttggctcctagggcggccaaagcgtggcttgcgttcagaagaaggtcgaagaggaagatagacaaagaggcttctcgcattgagaggttaaatttacagctttttcaacggaatcagtgcatcgtagaagaaaatgaaagactgaggaaacaggctttactactaactgaggagaatcaacttctacagcagaagctgcaagagcaacttaggtgtccagacaaagtcttgggagcctaa

SEQ ID NO: 819 - protein, 132 aa, Picea abies
MPLDNIWTVSSSSRRRPAQRLWFGREQVVLGQFLQRRSFSIKQRIKRRPILYSLAPRAAKAWLAFRRRSKRKIDKEASRIERLNLQLFQRNQCIVEENERLRKQALLLTEENQLLQQKLQEQLRCPDKVLGA

SEQ ID NO: 820 - DNA, 321 bp, Populus deltoides
atgtgcactaacggagtagacaggatcccttctcctttccaccctttaaagagaaggcaaagatcaaagaaatgtaaggttcaggttattgggctcacctgcaggaggtcaggatatgaggattgggaggagaagaacatggagctaaagaacttgaagctgtatttagagaaccaaagtatagttgaagagaacgagaagctgaggaagaaagctagtcttctccaccaagaaaacctggccttaatgtctgaacttcaaaagaaattccctcatttggatcgcttctccaacaccctacttctcttacacaaacactag

SEQ ID NO: 821 - protein, 106 aa, Populus deltoides
MCTNGVDRIPSPFHPLKRRQRSKKCKVQVIGLTCRRSGYEDWEEKNMELKNLKLYLENQSIVEENEKLRKKASLLHQENLALMSELQKKFPHLDRFSNTLLLLHKH

SEQ ID NO: 822 - DNA, 399 bp, Picea sitchensis
atgccgttagataacatttggacagtctcgagttcgagtcgccgaagacccgcgcaaaggctttggtttggccgcgagcaggttgttttgggccaatttctccagcggcgttcgttctcctttaagcaacgtattaaaaggcgtccgattttgtactctttggctcctagggcggctaaagcgtggcttgcgttcagaagaaggtcgaagaggaagatagacaaagaggcttctcgcattgagaggttaaatttacagctttttcaacggaatcagtgcatcgtagaagaaaatgaaagactgaggaaacaggctttactactaaccgaggagaatcaacttctacagcagaagctgcaagagcaacttaggtgtccagacaaagtcttgggagcctaa

SEQ ID NO: 823 - protein, 132 aa, Picea sitchensis
MPLDNIWTVSSSSRRRPAQRLWFGREQVVLGQFLQRRSFSFKQRIKRRPILYSLAPRAAKAWLAFRRRSKRKIDKEASRIERLNLQLFQRNQCIVEENERLRKQALLLTEENQLLQQKLQEQLRCPDKVLGA

SEQ ID NO: 824 - DNA, 339 bp, Populus tremula
atgtgtactggtacttgttcgaaactgagaccatgcagtcccttgtatattgctcttagcaatcaacagccatcaaaaggacacaaccttcgatatcatagactcaaccgaaggagaaggttgtcgaaagggaagagggtggcacttgtactggtcaagaaagagatggaaatcaagaacttgaaactgttcatggagaacaaaagcatcatcgaagagaatgagaagctgagaaagaaagcatttcttctacaccaggaaaatcaggccttgctttatgagctccaaaagaagcgctctgatcctcgccatgaccacttggctcacagcaacagctaa

SEQ ID NO: 825 - protein, 112 aa, Populus tremula
MCTGTCSKLRPCSPLYIALSNQQPSKGHNLRYHRLNRRRRLSKGKRVALVLVKKEMEIKNLKLFMENKSIIEENEKLRKKAFLLHQENQALLYELQKKRSDPRHDHLAHSNS

SEQ ID NO: 826 - DNA, 321 bp, Populus trichocarpa
atgtgcactaacggagtagacaggatcccttctcctttccacccttcaaagagaaggcaaagatcaaagaaatgtaaggttcaggttattgggctcacctgcaggaggtcaggatatgaggaatgggaggagaagaacatggagctaaagaacttgaagctgtatttagagaaccaaagtattgttgaagagaacgagaagctgaggaagaaagctagtcttctccaccaagaaaacctggccttaatgtctgaacttcaaaagaaattccctcatttggatcgcttctccaacaccctacttctcttacacaaacactag

SEQ ID NO: 827 - protein, 106 aa, Populus trichocarpa
MCTNGVDRIPSPFHPSKRRQRSKKCKVQVIGLTCRRSGYEEWEEKNMELKNLKLYLENQSIVEENEKLRKKASLLHQENLALMSELQKKFPHLDRFSNTLLLLHKH

SEQ ID NO: 828 - DNA, 339 bp, Populus trichocarpa
atgtgtactggtacttgttcgaaactgagcccatgcagtcccttgtatattgctcttagcaatcaacagccatcaaaaggacacaaccttcgatatcatagactcaaccgaaggagaaggttgtcaaaagggaagagggtggcactggtactggtcaagaaagagatggaaatcaagaacttgaaactgtacatggagaataaaagcatcatagaagagaatgagaagctgagaaagaaagcatttcttctacaccaggaaaatcaagctttgctttatcagctccaaaagaagcgctctaatcctcgccatgaccacttggctcacagcaacaactaa

SEQ ID NO: 829 - protein, 112 aa, Populus trichocarpa
MCTGTCSKLSPCSPLYIALSNQQPSKGHNLRYHRLNRRRRLSKGKRVALVLVKKEMEIKNLKLYMENKSIIEENEKLRKKAFLLHQENQALLYQLQKKRSNPRHDHLAHSNN

SEQ ID NO: 830 - DNA, 327 bp, Phaseolus vulgaris
atgtgctctttctcttcagaaaagacaccatatcatccccttgttcttgctcttcaacctccatgcccttccaagagacaccaccaccttcgcttgagcctccataaaagaaggagagcacaagttgaagaaagaagaaggaaaaagatgattttgaagaaagaaatgaagatgagaaacttgaagttgtacatgaagaaccaaagcataattgaggaaaatgagaagttgagaaagcaagcacttcttcttcacaaagagaatgagaccctcttatttgagcttcaaaacaagttctcccaacaaagtaacatcaaaaccaaataa

SEQ ID NO: 831 - protein, 108 aa, Phaseolus vulgaris
MCSFSSEKTPYHPLVLALQPPCPSKRHHHLRLSLHKRRRAQVEERRRKKMILKKEMKMRNLKLYMKNQSIIEENEKLRKQALLLHKENETLLFELQNKFSQQSNIKTK

SEQ ID NO: 832 - DNA, 321 bp, Rosa chinensis
atgtgtaggaactcctcagaaatgattccatacagtcctctgtactcttctttccgcctccgacggccatcaaagcatcacagctttcgcgttcaccgcctaatcaacaggaggagatcaattacaaaagaagcaaaagagaaggagatggaaatcaagaacctgaagttgtacatggagaataagagcataatagaagagaataacaagttgaggagaaaagcacttctccttgtccaagagaatcaagctttgttttcgcagctccaacagaaaatctcagaccatgcatgcagtgctactatgaaacaagatcactaa

SEQ ID NO: 833 - protein, 106 aa, Rosa chinensis
MCRNSSEMIPYSPLYSSFRLRRPSKHHSFRVHRLINRRRSITKEAKEKEMEIKNLKLYMENKSIIEENNKLRRKALLLVQENQALFSQLQQKISDHACSATMKQDH

SEQ ID NO: 834 - DNA, 342 bp, Sorghum bicolor
atgtgctccggctcctcctggtcctggagcagcagcagcagcaagaagcacccgtctcttgttgtcgtcaacctcgagcggcagctgcggaagacgacgacgtctcatgtctcagttgccatcaggagaaagaggctgaggctgaggaggttgaggttgagagccggagcagaggccatggagatgctgaacctgaagctctacctggagaaccggtgcatcctcgccgagaacgagaggctccgggagagggccaccgcgctccgccgcgagaacctcgcgctgctgcagaacctgtccaagacggcggccgtgccagaggcaggagcaggagctgcgtga

SEQ ID NO: 835 - protein, 113 aa, Sorghum bicolor
MCSGSSWSWSSSSSKKHPSLVVVNLERQLRKTTTSHVSVAIRRKRLRLRRLRLRAGAEAMEMLNLKLYLENRCILAENERLRERATALRRENLALLQNLSKTAAVPEAGAGAA

SEQ ID NO: 836 - DNA, 333 bp, Saccharum hybrid cultivar
atgtgctccggctcctggtcctggagcagcagcaagaagcacccgtctcttgttgtcgtcaacctcaagcggcagctgcagaagacgccgccgcctcatgtctcagttgccatcaggagaaagaggttgaggctgaggaggttgagaggcggagcagaggccatggagatactgaacctgaagctctacctggagaaccgttgcattatcgcggagaacgagaggctccgggaaaaggccaccgcactccgccgtgagaacctcgcgctgctccagaacctgtccaagacggcggccgtgccagaggcaggagcgggagctggaactgcgtga

SEQ ID NO: 837 - protein, 110 aa, Saccharum hybrid cultivar
MCSGSWSWSSSKKHPSLVVVNLKRQLQKTPPPHVSVAIRRKRLRLRRLRGGAEAMEILNLKLYLENRCIIAENERLREKATALRRENLALLQNLSKTAAVPEAGAGAGTA

SEQ ID NO: 838 - DNA, 333 bp, Saccharum hybrid cultivar
atgtgctccggctcctggtcctggagcagcagcaagaagcacccgtctcttgttgtcgtcaacctcaagcggcagctgcagaagacgcagccgcctcatgtctcagttgccatcaggagaaagaggttgaggctgaggaggttgagagccggagcagaggccatggagatactgaacctgaagctctacctggagaaccgttgcattatcgcggagaacgagaggctccgggaaaaggccaccgcactccgccgcgagaacctcgcgctgctccagaacctgtccaagacggcggccgtgccagaggcaggagcgggagctggaactgcgtga

SEQ ID NO: 839 - protein, 110 aa, Saccharum hybrid cultivar
MCSGSWSWSSSKKHPSLVVVNLKRQLQKTQPPHVSVAIRRKRLRLRRLRAGAEAMEILNLKLYLENRCIIAENERLREKATALRRENLALLQNLSKTAAVPEAGAGAGTA

SEQ ID NO: 840 - DNA, 348 bp, Solanum lycopersicum
atgtgtataagttcaacagaatggagtaataattcatcacgtcctctttatttttctatgcagaaaaaacaaagaccaaagatatctcgagttcaacttcataggcttgcaaggaagaaaagaggtgaaggaaaagaaactaaggtggatatggaaatgagaaatttgaagctttatatggaaaatatgagtattttagaggaaaatgagaaattgagaaagaaagcaagtcttttacatgaagaaaatattgctttgatgtttgaatttcaaaagaaattttgtaagtttgatagagtctctaacaaagagaccccccatctacccactactaaattgacaaaataa

SEQ ID NO: 841 - protein, 115 aa, Solanum lycopersicum
MCISSTEWSNNSSRPLYFSMQKKQRPKISRVQLHRLARKKRGEGKETKVDMEMRNLKLYMENMSILEENEKLRKKASLLHEENIALMFEFQKKFCKFDRVSNKETPHLPTTKLTK

SEQ ID NO: 842 - DNA, 348 bp, Sorghum propinquum
atgtgctccggctcctcctggtcctggagcagcagcagcagcagcagcaagaagcacccgtctcttgttgtcgtcaacctcgagcggcagctgctgaagacgacgacgtctcatgtctcagttgccatcaggagaaagaggctgaggctgaggaggttgaggttgagagccggagcagaggccatggagatactgaacctgaagctctacctggagaaccggtgcatcctcgccgagaacgagaggctccgggagagggccaccgcgctccgccgcgagaacctcgcgctgctccagaacctgtccaagacggcggccgtggcagaggcaggagcaggagctgcgtga

SEQ ID NO: 843 - protein, 115 aa, Sorghum propinquum
MCSGSSWSWSSSSSSSKKHPSLVVVNLERQLLKTTTSHVSVAIRRKRLRLRRLRLRAGAEAMEILNLKLYLENRCILAENERLRERATALRRENLALLQNLSKTAAVAEAGAGAA

SEQ ID NO: 844 - DNA, 348 bp, Solanum tuberosum
atgtgtataagttcaacagaatggagtaataattcatcacgtcctctttatttttctatgcagaaaaaacaaagaccaaagatctctcgagttcaacttcataggcttgcaaggaggaaaagaagtgagggaaaagaaactaaggtggatgtggaaatgagaaatttgaagctttatatggaaaatatgagtattttacaggaaaatgagaaattgagaaagaaagcaagtcttttacatgaagaaaatattgctttgatgactgaatttcaaaagaaattttctaagtttgatagagtctctaccaaagagaccccccatctacccactactaaattgacaaaataa

SEQ ID NO: 845 - protein, 115 aa, Solanum tuberosum
MCISSTEWSNNSSRPLYFSMQKKQRPKISRVQLHRLARRKRSEGKETKVDVEMRNLKLYMENMSILQENEKLRKKASLLHEENIALMTEFQKKFSKFDRVSTKETPHLPTTKLTK

SEQ ID NO: 846 - DNA, 345 bp, Solanum tuberosum
atgtgtcatgcagtttctgatcatttagagtcatttcaaccttcatgttacactgacctagtccacaggccacaaacatctaaaacaaccaagatacatgtgctcaagctaagaagaaggaacggtgaaagattgtcgaacgaagcaaagaaaagggcaaagttaaggaaattgaagaaactaatgaagatgaagaacttgaagctctacaaagagaacaaaatcattattgaagagaatgaaaagttgcgcaaaagagctcttcttcttcatcaagaaaacaaagccatgttcactcaaattattcaacaaatttctcaaccctctaataatcacaattattaa

SEQ ID NO: 847 - protein, 114 aa, Solanum tuberosum
MCHAVSDHLESFQPSCYTDLVHRPQTSKTTKIHVLKLRRRNGERLSNEAKKRAKLRKLKKLMKMKNLKLYKENKIIIEENEKLRKRALLLHQENKAMFTQIIQQISQPSNNHNY

SEQ ID NO: 848 - DNA, 315 bp, Theobroma cacao
atgtgtaacaacatggattggagcccaaccatctctgcttcttcaaagagaaggcatagatcaaaacaatctaaagttcaaatttacaggctttccaggaaaagatgcgaagaaaatgtggagaaagacatggaacgactgaacttgaagctctacttggagaaccaaagtattattgaagagaatgagaagttaagaaagaaagccaatcttctccatcaagaaaacttagccttaatgtctgattttcagaagaagtttcctcatttggatcgtttttccaccacccttttgcttcttctgcgaaatcactga

SEQ ID NO: 849 - protein, 104 aa, Theobroma cacao
MCNNMDWSPTISASSKRRHRSKQSKVQIYRLSRKRCEENVEKDMERLNLKLYLENQSIIEENEKLRKKANLLHQENLALMSDFQKKFPHLDRFSTTLLLLLRNH

SEQ ID NO: 850 - DNA, 321 bp, Theobroma cacao
atgtgcatgatctcttcagagtcgatcccaagccgttccctgtattccttctaccggaaacgtccttccaagcgacataacgttcttgttcgaagactcaacaggtggagaaggttgaggaagggagcgggaacaaagaaggtggtcgtcggcgttcaaacagatatgcaaatgaagaacttgaaactgtacatgcagaaccaaatcatcatagaagagaatgagaggctgaggaagaaagctattctcctccaccaggagaaccaaaccctgttggctcagctacagaagaagctctccaatccccaaaattcctcctaa

SEQ ID NO: 851 - protein, 106 aa, Theobroma cacao
MCMISSESIPSRSLYSFYRKRPSKRHNVLVRRLNRWRRLRKGAGTKKVVVGVQTDMQMKNLKLYMQNQIIIEENERLRKKAILLHQENQTLLAQLQKKLSNPQNSS

SEQ ID NO: 852 - DNA, 321 bp, Taiwania cryptomerioides
atgtgggttaaaaggattgatagcttgtcaaacgcaaagcgacgcagggtgggacaaaggctgtggttgataagtgctgttgataagagacaccccactttgtcttcagtcaaggcatgggttgtttgcagaagaagggttaagaggacgtctgacaaagaggctttgcgcattcaaaggttaaacttacagctttatgaacggaatcagagtattgtgcaagaaaatgaaaggctgaggaaacaggctttacttctcagcgaggagaatcagaatctacagcagaagctgcaagagcaaattagcatgcccgaacaatag

SEQ ID NO: 853 - protein, 106 aa, Taiwania cryptomerioides
MWVKRIDSLSNAKRRRVGQRLWLISAVDKRHPTLSSVKAWVVCRRRVKRTSDKEALRIQRLNLQLYERNQSIVQENERLRKQALLLSEENQNLQQKLQEQISMPEQ

SEQ ID NO: 854 - DNA, 273 bp, Triphysaria sp.
atgtgtcaaggatcgaatactcgattgatacaagcacacaaacttcgtttcttcccaagaagagataaacgaacgtgtgttcgtgttctcgggctatcaagaagggacgaaaagatggacaagaacatggaagagaagaacatgaagctatacatggagaacatgagcatattgctagaaaatgagaagttgaggcgccaagctaatctccttcaccaagagagacttgctttaatatctcagtttcaaaatagatttcccgatgataaatga

SEQ ID NO: 855 - protein, 90 aa, Triphysaria sp.
MCQGSNTRLIQAHKLRFFPRRDKRTCVRVLGLSRRDEKMDKNMEEKNMKLYMENMSILLENEKLRRQANLLHQERLALISQFQNRFPDDK

SEQ ID NO: 856 - DNA, 300 bp, Vitis vinifera
atgtgtatgagcactgcagagtggatcccatctcgacctcgaaccaagagatctaaggttcaagttcacaggcttaccaggaggagaagatgtgaagtacaggttgagaaggatatggaactgaagaacttgaagctgtatttggagaataggaatatcatggaagagaatgagaaactgaggaagaaggctacccttctccaccaagagaatctagctttgatgtctgagtttcagaccaaattccctcatttcaaccgcttctccaccaccctctttcttgttcttaacaaacagtga

SEQ ID NO: 857 - protein, 99 aa, Vitis vinifera
MCMSTAEWIPSRPRTKRSKVQVHRLTRRRRCEVQVEKDMELKNLKLYLENRNIMEENEKLRKKATLLHQENLALMSEFQTKFPHFNRFSTTLFLVLNKQ

SEQ ID NO: 858 - DNA, 252 bp, Vitis vinifera
atgcttgttttgtttgtatggatgagatctagaagaaccagaaaagaatcaaaagacaaggccatgatggtggtgggggtgaagtcagagatggagataaagaactggaagctctacatgttgaaccaaagcatcatacaagagaatgaaaagctgagaatgaaagctcttcttcttcatcaagaaaaccaagccttgctatctcagcttcaaaataagttcaaaacctctcctcacaacaacaatcactaa

SEQ ID NO: 859 - protein, 83 aa, Vitis vinifera
MLVLFVWMRSRRTRKESKDKAMMVVGVKSEMEIKNWKLYMLNQSIIQENEKLRMKALLLHQENQALLSQLQNKFKTSPHNNNH

SEQ ID NO: 860 - DNA, 456 bp, Zea mays
atgtgctccggctcctggtcctggagcagcagcaagaagcgcccgtctcttgttgtcgtcaacctcaagcggcagcagctgcagaagacgccgccgccgacgccgcctcgtgcctcagttgctatcaggaggaagaggtacccagctaacccgccctgctcgagtttcccaagcttcctctgctcaagtttcagcagcatcagcgacagtttcctgcaatcacacaagtacactgtacacgtacgcaggctgaggctgaggaggttgagagccggagcagaggccatggagatggtgaacctgaagctctacctggagaaccggtgcatcatcgcggagaacgagaggctgcgggagagggccagcgcgctccgccgcgagaacctcgcgctgctccaggacctgtccaagacgccggccgtgccagaggcaggagcgggagctggagctgcgtga

SEQ ID NO: 861 - protein, 151 aa, Zea mays
MCSGSWSWSSSKKRPSLVVVNLKRQQLQKTPPPTPPRASVAIRRKRYPANPPCSSFPSFLCSSFSSISDSFLQSHKYTVHVRRLRLRRLRAGAEAMEMVNLKLYLENRCIIAENERLRERASALRRENLALLQDLSKTPAVPEAGAGAGAA

SEQ ID NO: 862 - DNA, 327 bp, Zea mays
tgaccgtgttcttatatgaccaaaagagttagttcttgccaacaaaatctagttaatccgcgcacttataatgtacagacaccatggcgcagagcaccccaagagagctccaggaacctggcggtttatgtatgagcagttgagcacagagccacacagacatggcggagcagccaagcagatggcctcctagggctacgagttcactggcctgtctcctgtccacacaagtagcacaagcaccaacgacgagggtgacgcgagctcgctacttcatgttcagcaggcaggcaggcagaggatcgaagcagcaacctcacgcagctc

SEQ ID NO: 863 - protein, 108 aa, Zea mays
MCSGSWFWSSSGSGKEHPSLVVVNLERQLKKTLAVRRRRRLRLRRLRDGGAEAMEMVNLKLYLENRCIIAENERLRERASALRRENLALLQNLSSRTAAVPEPGAGAA

SEQ ID NO: 864 - DNA, 471 bp, Zea mays
atgtgctccggctcctggtcctggagcagcagcaagaagcgcagcgcccgtctcttgttgtcgtcaacctcaagcggcgccagctgcagaagacgccgccgccgacgccacctcgttcctcagttgctatcaggaggaagaggtacccagctaacccgccctgctcgagtttcccaagcttcctttgctcaagtttcagcaccatcagcgacagtttcctgcaatcacacaagtacactgtacacgtacgtacgcaggctgagactgaggaggttgcgagccggagcagaggccatggagatggtgaacctgaagctctacctggagaaccggtgcatcatcgcggagaacgagaagctgcgggagagggccagcgcgctccgccgcgagaacctcgcgctgctccaggacctgtccaagacgccggccgtgccagaggcaggagcgggagcgggagctggagctgcgtga

SEQ ID NO: 865 - protein, 156 aa, Zea mays
MCSGSWSWSSSKKRSARLLLSSTSSGASCRRRRRRRHLVPQLLSGGRGTQLTRPARVSQASFAQVSAPSATVSCNHTSTLYTYVRRLRLRRLRAGAEAMEMVNLKLYLENRCIIAENEKLRERASALRRENLALLQDLSKTPAVPEAGAGAGAGAA

SEQ ID NO: 866 - DNA, 345 bp, Zea mays
atcactggtgcatcgttctgtatccagctctgaatgaagcactgacagctgaagtgcagcgcctgaaacaaatggctggcgaggccagtgatcttcatgtgccgaacggttcgcatcatcatatgaaccgccagattctcgaacagcagctgcagcaggtacagaagcagccatcagaggcccagcaggctcagcagcagcagcagcagccacaggaaccagagcagttcaaagctcagcaaaagcagtggaaccattaagacgattgatttcacagagcacatgcttgaaggtcaaattcatactgcagattcatgaagggataccttgtgttcccggatattc

SEQ ID NO: 867 - protein, 114 aa, Zea mays
MCSGSWSWSSSKKRPSLVVVNLKRQQLQKTPPPTPPRASVAIRRKRLRLRRLRAGAEAMEMVNLKLYLENRCIIAENERLRERASALRRENLALLQDLSKTPAVPEAGAGAGAA

SEQ ID NO: 868 - DNA, 357 bp, Zea mays
atgtgctccggctcctggtcctggagcagcagcaagaagcgcaagcgcccgtctcttgttgtcgtcaacctcaagcggcgccagctgcagaagacgccgccgccgacgccacctcgttcctcagttgctatcaggaggaagaggctgagactgaggaggttgcgagccggagcagaggccatggagatggtgaacctgaagctctacctggagaaccggtgcatcatcgcggagaacgagaagctgcgggagagggccagcgcgctccgccgcgagaacctcgcgctgctccaggacctgtccaagacgccggccgtgccagaggcaggagcgggagcgggagctggagctgcgtga

SEQ ID NO: 869 - protein, 118 aa, Zea mays
MCSGSWSWSSSKKRKRPSLVVVNLKRRQLQKTPPPTPPRSSVAIRRKRLRLRRLRAGAEAMEMVNLKLYLENRCIIAENEKLRERASALRRENLALLQDLSKTPAVPEAGAGAGAGAA

SEQ ID NO: 870 - DNA, 537 bp, Zea mays
atgcgtcgcgcgcgtcaatgcgtgcatgcaccaccaaacaaaaaacctaaagcgaccacccaagccctgaggcgaggcgaggcgaggcgagatctatctttatatatagccttgaagcccttggaacacttcatctccaaattaagtcgccgagctctgaagaatctagctaggagcaggccgcctacgccatcggccgtccacagcaacatgtgctccggctcctggttctggagcagcagcggcagcggcaaggagcacccgtctcttgtcgtcgtcaacctcgagcggcagctaaagaagacgctggccgtcaggagaaggaggaggttgaggctgaggaggttgcgagacggaggagcagaggccatggagatggtgaacctgaagctgtatctggagaaccggtgcatcatcgcagagaacgagaggctccgggagagggccagcgcgctccgccgcgagaacctcgcgctgctccagaacctgtcgtccaggacggcggccgtgccagagccaggagcgggagctgcgtga

SEQ ID NO: 871 - protein, 178 aa, Zea mays
MRRARQCVHAPPNKKPKATTQALRRGEARRDLSLYIALKPLEHFISKLSRRALKNLARSRPPTPSAVHSNMCSGSWFWSSSGSGKEHPSLVVVNLERQLKKTLAVRRRRRLRLRRLRDGGAEAMEMVNLKLYLENRCIIAENERLRERASALRRENLALLQNLSSRTAAVPEPGAGAA

SEQ ID NO: 872 - DNA, 537 bp, Zea mays
atgcgtcgcgcgcgtcaatgcgtgcatgcaccaccaaacaaaaaacctaaagcgaccacccaagccctgaggcgaggcgaggcgaggcgagatctatctttatatatagccttgaagcccttggaacacttcatctccaaattaagtcgccgagctctgaagaatctagctaggagcaggccgcctacgccatcggccgtccacagcaacatgtgctccggctcctggttctggagcagcagcggcagcggcaaggagcacccgtctcttgtcgtcgtcaacctcgagcggcagctaaagaagacgctgaccgtcaggagaaggaggaggttgaggctgaggaggttgcgagccggaggagcagaggccatggagatggtgaacctgaagctgtatctggagaaccggtgcatcatcgcagagaacgagaggctccgggagagggccagcgcgctccgccgcgagaacctcgcgctgctccagaacctgtcgtccaggacggcggccgtgccagagccaggagcgggagctgcgtga

SEQ ID NO: 873 - protein, 178 aa, Zea mays
MRRARQCVHAPPNKKPKATTQALRRGEARRDLSLYIALKPLEHFISKLSRRALKNLARSRPPTPSAVHSNMCSGSWFWSSSGSGKEHPSLVVVNLERQLKKTLTVRRRRRLRLRRLRAGGAEAMEMVNLKLYLENRCIIAENERLRERASALRRENLALLQNLSSRTAAVPEPGAGAA

SEQ ID NO: 874 - DNA, 219 bp, Arabidopsis thaliana
atggagaggctaaactcgaagctgtacttgcaaaactgttatataataaaggagaacgagaggttgaggaagaaagctcagattctgaaccaagagaatcaacaacttctcttcgaactcaaacaaaagctctcgaaaaccaagaactctagtggatcaaatcaaggaaacaacaacaacaacaacaacctctcttcatcaagctctgcttctggataa

SEQ ID NO: 875 - protein, 72 aa, Arabidopsis thaliana
MERLNSKLYLQNCYIIKENERLRKKAQILNQENQQLLFELKQKLSKTKNSSGSNQGNNNNNNNLSSSSSASG

SEQ ID NO: 876 - DNA, 204 bp, Arabidopsis thaliana
atggagaggctaaactcgaagctgtttgttgaaaactgttacataatgaaagagaacgagagactaaggaagaaagctgagcttctgaatcaagagaaccaacagcttttgtttcaactcaaacagaaactctccaaaactaagaactctaacaatggatcaaacaatgacaacaaatcaagctctgcttctggacaatcttga

SEQ ID NO: 877 - protein, 67 aa, Arabidopsis thaliana
MERLNSKLFVENCYIMKENERLRKKAELLNQENQQLLFQLKQKLSKTKNSNNGSNNDNKSSSASGQS

SEQ ID NO: 878 - DNA, 171 bp, Brassica napus
atgtggaggaaggaaaaggagatggagatggaaaatataaggctttacatggagaaccaatacatcatacaagagaatgagaaactcaagaagaaagctcttcttcttcaccaagaaaacaaagctctcttctctcagcttcagaccaaaaaagtttcacatgttccataa

SEQ ID NO: 879 - protein, 56 aa, Brassica napus
MWRKEKEMEMENIRLYMENQYIIQENEKLKKKALLLHQENKALFSQLQTKKVSHVP

SEQ ID NO: 880 - DNA, 207 bp, Helianthus annuus
atggaaaggttgaactcaaagctgtacatggagaactgtctgataatgcaagagaatgagaagttaaggaagaaagcacagattctgaatcaagagaatcaagcattgctctcacagctgaaacagaggataacaatgggtgctcaaaatgggtctcaaaccaccaatggaactcatgcttcttcttctgcgtctaggaacccttga

SEQ ID NO: 881 - protein, 68 aa, Helianthus annuus
MERLNSKLYMENCLIMQENEKLRKKAQILNQENQALLSQLKQRITMGAQNGSQTTNGTHASSSASRNP

SEQ ID NO: 882 - DNA, 279 bp, Hordeum vulgare
atggacaggcttaacgccaagctctacatgcagaactgctacatcctcaaggagaacgaacggctgcgcaagaaggcccagctgctgaaccaggagaaccaggccctgctcagcgagctcaagcagcggctcgccaagaccgcggccagcaaggccaccggcaacggcaacgccggcgccggcgtccgtggggccctccccgacctcaatgcggctccaccggcacacgccgtccatgacaaggcggcgcccaagcccaagaagactgtcgcaaactga

SEQ ID NO: 883 - protein, 92 aa, Hordeum vulgare
MDRLNAKLYMQNCYILKENERLRKKAQLLNQENQALLSELKQRLAKTAASKATGNGNAGAGVRGALPDLNAAPPAHAVHDKAAPKPKKTVAN

SEQ ID NO: 884 - DNA, 248 bp, Lactuca perennis
atggtgttcaaccacctaccggaagcggaaatggaaaggctgaattcaaagctatacatggaaaactatttgataatgcaagagagcgagaaactgaggaagaaagcgtaacttcttaaccaagagaatcaagcattgttgtctcagttgaagcagatgctcacgatgggtagccaaaatgtcaataatgcccctgactccttcgctgacctcagccttaataccaaagctacttcaagtttttgttc

SEQ ID NO: 885 - protein, 82 aa, Lactuca perennis
MVFNHLPEAEMERLNSKLYMENYLIMQESEKLRKKALLNQENQALLSQLKQMLTMGSQNVNNAPDSFADLSLNTKATSSFCS

SEQ ID NO: 886 - DNA, 234 bp, Medicago truncatula
atggaaagattgaacacagagttgtactaccaaaactgtcacataatgaaagagaatgaaaggcttaggaagaaagctcaaattctgaatcaagagaatcaagcacttttgtctcagcttaaacaaaagctctcaaatggtgctggtaactcaaaaaccaatgcaccaaacaacatgcttgaccttaaccttggatcaggttcaagtcaaaatgcttccaattccagcaattag

SEQ ID NO: 887 - protein, 77 aa, Medicago truncatula
MERLNTELYYQNCHIMKENERLRKKAQILNQENQALLSQLKQKLSNGAGNSKTNAPNNMLDLNLGSGSSQNASNSSN

SEQ ID NO: 888 - DNA, 198 bp, Nicotiana tabacum
tgggaagttggttaagagtagtggagcctgtgtcaaattgagaaaatttcttctgaaactgagacattaaactaaggttttcttgatggaggaggcttgccttcttcctcaatttctcattctcctctaaaatgctcatattttccatgtatagcttcaagtttctcatttccatatcctcagctgctttttcctcac

SEQ ID NO: 889 - protein, 65 aa, Nicotiana tabacum
MEMRNLKLYMENMSILEENEKLRKKASLLHQENLSLMSQFQKKFSQFDTGSTTLNQLPIHKQSCQ

SEQ ID NO: 890 - DNA, 300 bp, Oryza sativa
atggacaggctgaacgcgaagctgtacctgcagaactgctacatcatgaaggagaacgagcggctgcgcaagaaggcgctgctgctgaaccaggagaaccaggccttgctcaccgagctcaagcagcggctcgccaagacgaaggcggcggcggcggcggcggccgcgaccaaggctaacggcaacggcaacatgcccgccggcggcggccgcgcgtccctccccgacctcaactcggctccgccggcgcacggccatgacaaggccgtgcccaagtccaagaagacggccgccaagtaa

SEQ ID NO: 891 - protein, 99 aa, Oryza sativa
MDRLNAKLYLQNCYIMKENERLRKKALLLNQENQALLTELKQRLAKTKAAAAAAAATKANGNGNMPAGGGRASLPDLNSAPPAHGHDKAVPKSKKTAAK

SEQ ID NO: 892 - DNA, 297 bp, Oryza sativa
atgaactctgacagtgttagtttgtgtgtgcaggcgatggacagtctgaacacgaagctgtacctgcagaactgctacatgctcaaggagaacgagcggctgcgcaaggcggccgtgcttctcaaccaggagaaccaggccctgctctccgagctcaagcaccgcctcgccaggtcgccgtcgccggccgccgcggcacccggcgtcgccaacgacagcaagaacgccgccgccgccgccggccgccacgctggcccgcctccggtgcaggacaagtcagcctccaagtccaagtag

SEQ ID NO: 893 - protein, 98 aa, Oryza sativa
MNSDSVSLCVQAMDSLNTKLYLQNCYMLKENERLRKAAVLLNQENQALLSELKHRLARSPSPAAAAPGVANDSKNAAAAAGRHAGPPPVQDKSASKSK

SEQ ID NO: 894 - DNA, 246 bp, Oryza sativa
atggagagggtgaacctgaagctgtacctggagaacgtgtacataatggaggagaacgagcggctgcggaggaaggcgcaggcactcaaccaggagaacaaggccctcctcgccaagctcaacaccaaccacgccgccgcctcctcgacgtcgacgacgacccagcaccggccacccaccgccgcctccgcggccggcgccggcgcgtcgtccaccctcaagcccggcaagcagcagccaaagtga

SEQ ID NO: 895 - protein, 81 aa, Oryza sativa
MERVNLKLYLENVYIMEENERLRRKAQALNQENKALLAKLNTNHAAASSTSTTTQHRPPTAASAAGAGASSTLKPGKQQPK

SEQ ID NO: 896 - DNA, 354 bp, Oryza sativa
atgggcattgttcagcctctagtcaaacttgatttgaaagcagtttcaatttcacgcagaagggaaggaagaggatcgatggatcgggtgacgaacctgtacctggagaacctgtgcataatgcaggagaacgagcggctgaggaagaaggcgcagctgctggacaaggagaacaaggcgctcctcgccaagctcaagctcaagaacaacccctccaccgccgccgccgccgccgccgcctcctcgccgtcgtcccagcagcagccagacgccggcgcctcggcggccgccagcgtcgtcaaggccggcgcggcggcgccgtcgtcgtcctatggcgggaagaagaccaagtga

SEQ ID NO: 897 - protein, 117 aa, Oryza sativa
MGIVQPLVKLDLKAVSISRRREGRGSMDRVTNLYLENLCIMQENERLRKKAQLLDKENKALLAKLKLKNNPSTAAAAAAASSPSSQQQPDAGASAAASVVKAGAAAPSSSYGGKKTK

SEQ ID NO: 898 - DNA, 207 bp, Populus trichocarpa
atggaggggaaggacatggagctaaagaacttgaagttgtgtttagagaaccaaagaatcgttgaagagaacgagaagctgaggaagaaagctaatcttctccgccaagaaaacttggccttaatgtctgaatttcaaaagaaattccctcatttggatcgcttatccaccaccctacttcttttacacaacactagcaaaatgtaa

SEQ ID NO: 899 - protein, 68 aa, Populus trichocarpa
MEGKDMELKNLKLCLENQRIVEENEKLRKKANLLRQENLALMSEFQKKFPHLDRLSTTLLLLHNTSKM

SEQ ID NO: 900 - DNA, 234 bp, Populus trichocarpa
atggaaagactgaactccaagctgtacctgcagaactgctacataatgaaagaaaatgagaggctgaggaagaaagcacagcttctcaaccaggagaaccaagcactgttatctgagctgaagcagaaactctccaagcccaactcaaaaggcaattctcccaatgatactatacctgacctcaaccttagctccagttcggccccagatcctgccaattccggctctaactga

SEQ ID NO: 901 - protein, 77 aa, Populus trichocarpa
MERLNSKLYLQNCYIMKENERLRKKAQLLNQENQALLSELKQKLSKPNSKGNSPNDTIPDLNLSSSSAPDPANSGSN

SEQ ID NO: 902 - DNA, 234 bp, Populus trichocarpa; identical to SEQ ID NO: 900

SEQ ID NO: 903 - protein, 77 aa, Populus trichocarpa; identical to SEQ ID NO: 901

SEQ ID NO: 904 - DNA, 246 bp, Rosa hybrid cultivar
atggaaaggctaaactcgaagctgtacttgcagaatgtgtacataatgaaagagaatgagaggctgaggaagaaggcacagcttctgaaccaagagaatcaggcccttctttctgagctgaagcagaagctttcaaagccaaacaaagccaatggtgcttcaaacactgtgcctgatctgaatcttaacctgagctccaccaacaacaacaactcaaacaatcatccttccagttccagcaactga

SEQ ID NO: 905 - protein, 81 aa, Rosa hybrid cultivar
MERLNSKLYLQNVYIMKENERLRKKAQLLNQENQALLSELKQKLSKPNKANGASNTVPDLNLNLSSTNNNNSNNHPSSSSN

SEQ ID NO: 906 - DNA, 333 bp, Sorghum bicolor
atggagaggctgaacacgaagctgtacctgcagaactgctacatcatgaaggagaacgagcggctgcgcaaggcggccctgctgctgaaccaggagaaccaggccctgctctccgagctcaagcaccgcctcgccaagtcctccgccgccggtgctgccgtcgtcggcgggagcaacaacaacaacaacaacaacaacaacaacagcagcaacagctcggcagcggcggtggcgaaccgcgtctcgcccaagcccggcaacgacgccgctccgccgtcttctcatcaggccggcggcaagggcatgcctgccaccaagcccaagcccaagtag

SEQ ID NO: 907 - protein, 110 aa, Sorghum bicolor
MERLNTKLYLQNCYIMKENERLRKAALLLNQENQALLSELKHRLAKSSAAGAAVVGGSNNNNNNNNNNSSNSSAAAVANRVSPKPGNDAAPPSSHQAGGKGMPATKPKPK

SEQ ID NO: 908 - DNA, 315 bp, Sorghum bicolor
atggacagactgaacgcgaagctgtacctgcagaactgcttcatcatgaaggagaacgagcggctgcgcaagaaggcgctgctgctgaaccacgagaaccaggccctgctcaccgagctcaagcagcgcatcgccaaaacggcggcggcggcggccaccaacaacggcaacgccaagtccaacgggaatgtggcggcggcagctggcaaccgcacgccgatcccggacctcaatgcggccgctacaggtccaggggcgcacggcggccacgagaaggcggcgtcgcccaagccaaagaaggcggtcgcgaactga

SEQ ID NO: 909 - protein, 104 aa, Sorghum bicolor
MDRLNAKLYLQNCFIMKENERLRKKALLLNHENQALLTELKQRIAKTAAAAATNNGNAKSNGNVAAAAGNRTPIPDLNAAATGPGAHGGHEKAASPKPKKAVAN

SEQ ID NO: 910 - DNA, 234 bp, Vitis vinifera
atggaaaggctgaactcaaagctgtacttgcagaactgttacataattcaagagaatgagaggctaaggaagaaagcacagcttctcaaccaggagaatcaagcactgctgtctgagctgaagcagaagctctccaaggcaaactcaaaagcaagtgccgcaaacactattccagacctcaacctcagctcctctgcctccaccacatctgctgccaattccactgacccatga

SEQ ID NO: 911 - protein, 77 aa, Vitis vinifera
MERLNSKLYLQNCYIIQENERLRKKAQLLNQENQALLSELKQKLSKANSKASAANTIPDLNLSSSASTTSAANSTDP

SEQ ID NO: 912 - DNA, 171 bp, Zea mays
atggagatggtgaacctgaagctctacctggagaaccggtgcatcatcgcggagaacgagaggctgcgggagagggccagcgcgctccgccgcgagaacctcgcgctgctccaggacctgtccaagacgccggccgtgccagaggcaggagcgggagctggagctgcgtga

SEQ ID NO: 913 - protein, 56 aa, Zea mays
MEMVNLKLYLENRCIIAENERLRERASALRRENLALLQDLSKTPAVPEAGAGAGAA

SEQ ID NO: 914 - DNA, 177 bp, Zea mays
gatgcaccggttctccaggtagagcttcaggttcaccatctccatggcctctgctccggctcgcaacctcctcagtctcagcctgcgtacgtacgtgtacagtgtacttgtgtgattgcaggaaactgtcgctgatggtgctgaaacttgagcaaaggaagcttgggaaactcgagc

SEQ ID NO: 915 - protein, 58 aa, Zea mays
MEMVNLKLYLENRCIIAENEKLRERASALRRENLALLQDLSKTPAVPEAGAGAGAGAA

SEQ ID NO: 916 - DNA, 168 bp, Zea mays
atggagatggtgaacctgaagctgtatctggagaaccggtgcatcatcgcagagaacgagaggctccgggagagggccagcgcgctccgccgcgagaacctcgcgctgctccagaacctgtcgtccaggacggcggccgtgccagagccaggagcgggagctgcgtga

SEQ ID NO: 917 - protein, 55 aa, Zea mays
MEMVNLKLYLENRCIIAENERLRERASALRRENLALLQNLSSRTAAVPEPGAGAA

SEQ ID NO: 918 - DNA, 168 bp, Zea mays
atggagatggtgaacctgaagctgtatctggagaaccggtgcatcatcgcggagaatgagaggctccgggagagggccagcgcgctccgccgcgagaacctcgcgctgctccggaacctgtcgcccaggacggcggccgtgccagagccaggagcgggagctgcgtga

SEQ ID NO: 919 - protein, 55 aa, Zea mays
MEMVNLKLYLENRCIIAENERLRERASALRRENLALLRNLSPRTAAVPEPGAGAA

SEQ ID NO: 920 - DNA, 318 bp, Zea mays
atggacagactgaacgcgaagctgtacctgcagaactgcttcatcatgaaggagaacgagcggctgcgcaagaaggcgctgctgctcaaccaggagaaccaggccctgctcaccgagctcaagcagcggcgcatcgccaaaaccaaaacggcggcgccgcccaaccacagcgccaacgggaatgcggcggcggcagcaggccaccgcgcgccgatcccggacctcaatgccgccgctccgggcccgcgtgcagccggccacgagaaggcggcggcggcggcgtcgcccaacaagccgaagaaggcggtcgccaactga

SEQ ID NO: 921 - protein, 105 aa, Zea mays
MDRLNAKLYLQNCFIMKENERLRKKALLLNQENQALLTELKQRRIAKTKTAAPPNHSANGNAAAAAGHRAPIPDLNAAAPGPRAAGHEKAAAAASPNKPKKAVAN

SEQ ID NO: 922 - DNA, 399 bp, Zea mays
atgtgtcaaaatccagcacaagctcatcacaagctctctgctgccgcccccaccagcaaagcaaggccctcgagtgaccggggcagcgatcgagcggcttccaaccaggcaacaagggcgacgaaggacgatatggacaggctgaacgcgaagctgtacctgcacaactgcttcatcatgaaggagaacgagcggctgcgcaacaaggctctgctgctcaaccaggagaacaaggccttgctcaccgagctcaagcagcgcgtcgccagaacggcggcggcggcggcagcggcaggcaaccacgcgccaacgatcccggacctcaatgccgccgctcctgcaggggcgcacgagaagccggcggcgtcgcccaagccaaagaaggcggtcgcaaactga

SEQ ID NO: 923 - protein, 132 aa, Zea mays
MCQNPAQAHHKLSAAAPTSKARPSSDRGSDRAASNQATRATKDDMDRLNAKLYLHNCFIMKENERLRNKALLLNQENKALLTELKQRVARTAAAAAAAGNHAPTIPDLNAAAPAGAHEKPAASPKPKKAVAN

SEQ ID NO: 924 - DNA, 306 bp, Zea mays
atggacaggctgaacgcgaagctgtacctgcacaactgcttcatcatgaaggagaacgagcggctgcgcaacaaggctctgctgctcaaccaggagaacaaggccttgctcaccgagctcaagcagcgcgtcgccagaacggcggcgacggccaacggcaacggcaacgccaaggccaacgggaatgtggcggcggcggcaggcaaacgcgcgccaacgatcccggacctcaatgccgccgctcctgcaggggcgcacgagaagccggcggcgtcgcccaagccaaagaaggcggtcgcaaactga

SEQ ID NO: 925 - protein, 101 aa, Zea mays
MDRLNAKLYLHNCFIMKENERLRNKALLLNQENKALLTELKQRVARTAATANGNGNAKANGNVAAAAGKRAPTIPDLNAAAPAGAHEKPAASPKPKKAVAN

SEQ ID NO: 926 - DNA, 59 bp, Artificial sequence
  primer: prm15860
ggggacaagtttgtacaaaaaagcaggcttaaacaatgtgtcatgcaatttcagatcat

SEQ ID NO: 927 - DNA, 57 bp, Artificial sequence
  primer: prm15859
ggggaccactttgtacaagaaagctgggtctaattgtgattattagagggttgagaa

SEQ ID NO: 928 - DNA, 2194 bp, Oryza sativa; identical to SEQ ID NO: 247

SEQ ID NO: 929 - protein, 19 aa, Artificial sequence
  motif 8
  VARIANT (3)..(3): / replace = "Lys"
  VARIANT (7)..(7): / replace = "Arg"
  VARIANT (10)..(10): / replace = "Glu"
  VARIANT (11)..(11): / replace = "Arg"
  VARIANT (13)..(13): / replace = "Ser"
  VARIANT (14)..(14): / replace = "Ala"
  VARIANT (16)..(16): / replace = "Arg"
  VARIANT (17)..(17): / replace = "Arg"
IIEENEKLRKKALLLHQEN

SEQ ID NO: 930 - protein, 15 aa, Artificial sequence
  motif 9
  VARIANT (1)..(1): / replace = "Ile"
  VARIANT (3)..(3): / replace = "Lys"
  VARIANT (4)..(4): / replace = "Ile"
  VARIANT (11)..(11): / replace = "Met" / replace = "Leu"
  VARIANT (14)..(14): / replace = "Gln"
  VARIANT (15)..(15): / replace = "Cys" / replace = "Ile"
EMEMKNLKLYEENKS

SEQ ID NO: 931 - protein, 15 aa, Artificial sequence
  motif 10
  VARIANT (1)..(1): / replace = "Lys" / replace = "Leu"
  VARIANT (2)..(2): / replace = "Asp"
  VARIANT (4)..(4): / replace = "Phe"
  VARIANT (5)..(5): / replace = "Thr"
  VARIANT (6)..(6): / replace = "Glu"
  VARIANT (7)..(7): / replace = "Ile"
  VARIANT (8)..(8): / replace = "Ile"
  VARIANT (9)..(9): / replace = "Gln"
  VARIANT (10)..(10): / replace = "Gln"
  VARIANT (11)..(11): / replace = "Ile"
  UNSURE (13)..(13): Xaa can be any naturally occurring amino acid
  UNSURE (15)..(15): Xaa can be any naturally occurring amino acid
QALLSQLQKKLSXPX

SEQ ID NO: 932 - protein, 50 aa, Artificial sequence
  motif 11
  VARIANT (2)..(2): / replace = "Leu"
  VARIANT (3)..(3): / replace = "Ala"
  VARIANT (5)..(5): / replace = "Ile"
  VARIANT (7)..(7): / replace = "Lys"
  VARIANT (15)..(15): / replace = "Glu" / replace = "Leu"
  VARIANT (18)..(18): / replace = "Lys" / replace = "Arg"
  VARIANT (19)..(19): / replace = "Ile" / replace = "Cys"
  VARIANT (21)..(21): / replace = "Leu"
  VARIANT (26)..(26): / replace = "Arg"
  VARIANT (29)..(29): / replace = "Glu"
  VARIANT (30)..(30): / replace = "Arg" / replace = "Gln"
  VARIANT (32)..(32): / replace = "Ser"
  VARIANT (33)..(33): / replace = "Ala"
  VARIANT (35)..(35): / replace = "Arg"
  VARIANT (36)..(36): / replace = "Arg"
  VARIANT (39)..(39): / replace = "Lys" / replace = "Gln"
  VARIANT (40)..(40): / replace = "Asp"
  VARIANT (42)..(42): / replace = "Phe"
  VARIANT (43)..(43): / replace = "Thr" / replace = "Gln"
  VARIANT (44)..(44): / replace = "Ile"
  VARIANT (45)..(45): / replace = "Ile"
  VARIANT (46)..(46): / replace = "Ile"
  VARIANT (47)..(47): / replace = "Gln" / replace = "Asn"
  VARIANT (48)..(48): / replace = "Gln"
  VARIANT (49)..(49): / replace = "Phe"
KVKKEMEMKNLKLYMENQSIIEENEKLRKKALLLHQENLALLSQLQKKIS

SEQ ID NO: 933 - protein, 11 aa, Artificial sequence
  motif 12
  VARIANT (3)..(3): / replace = "Ser"
  VARIANT (4)..(4): / replace = "Gly"
  VARIANT (5)..(5): / replace = "Ile"
  UNSURE (7)..(7): Xaa can be any naturally occurring amino acid
  VARIANT (8)..(8): / replace = "Ser"
  VARIANT (9)..(9): / replace = "Ser"
  VARIANT (10)..(10): / replace = "Ser"
MCHASSXHLES

SEQ ID NO: 934 - protein, 8 aa, Artificial sequence
  motif 13
  VARIANT (1)..(1): / replace = "Ile"
  VARIANT (2)..(2): / replace = "Ser"
  VARIANT (3)..(3): / replace = "Val"
  VARIANT (5)..(5): / replace = "Lys"
  VARIANT (6)..(6): / replace = "Arg"
VHRLNLRR

SEQ ID NO: 935 - DNA, 2798 bp, Artificial sequence
  expression cassette pGOS2::ZPR::tzein
aatccgaaaagtttctgcaccgttttcaccccctaactaacaatatagggaacgtgtgctaaatataaaatgagaccttatatatgtagcgctgataactagaactatgcaagaaaaactcatccacctactttagtggcaatcgggctaaataaaaaagagtcgctacactagtttcgttttccttagtaattaagtgggaaaatgaaatcattattgcttagaatatacgttcacatctctgtcatgaagttaaattattcgaggtagccataattgtcatcaaactcttcttgaataaaaaaatctttctagctgaactcaatgggtaaagagagagattttttttaaaaaaatagaatgaagatattctgaacgtattggcaaagatttaaacatataattatataattttatagtttgtgcattcgtcatatcgcacatcattaaggacatgtcttactccatcccaatttttatttagtaattaaagacaattgacttatttttattatttatcttttttcgattagatgcaaggtacttacgcacacactttgtgctcatgtgcatgtgtgagtgcacctcctcaatacacgttcaactagcaacacatctctaatatcactcgcctatttaatacatttaggtagcaatatctgaattcaagcactccaccatcaccagaccacttttaataatatctaaaatacaaaaaataattttacagaatagcatgaaaagtatgaaacgaactatttaggtttttcacatacaaaaaaaaaaagaattttgctcgtgcgcgagcgccaatctcccatattgggcacacaggcaacaacagagtggctgcccacagaacaacccacaaaaaacgatgatctaacggaggacagcaagtccgcaacaaccttttaacagcaggctttgcggccaggagagaggaggagaggcaaagaaaaccaagcatcctccttctcccatctataaattcctccccccttttcccctctctatataggaggcatccaagccaagaagagggagagcaccaaggacacgcgactagcagaagccgagcgaccgccttctcgatccatatcttccggtcgagttcttggtcgatctcttccctcctccacctcctcctcacagggtatgtgcctcccttcggttgttcttggatttattgttctaggttgtgtagtacgggcgttgatgttaggaaaggggatctgtatctgtgatgattcctgttcttggatttgggatagaggggttcttgatgttgcatgttatcggttcggtttgattagtagtatggttttcaatcgtctggagagctctatggaaatgaaatggtttagggatcggaatcttgcgattttgtgagtaccttttgtttgaggtaaaatcagagcaccggtgattttgcttggtgtaataaagtacggttgtttggtcctcgattctggtagtgatgcttctcgatttgacgaagctatcctttgtttattccctattgaacaaaaataatccaactttgaagacggtcccgttgatgagattgaatgattgattcttaagcctgtccaaaatttcgcagctggcttgtttagatacagtagtccccatcacgaaattcatggaaacagttataatcctcaggaacaggggattccctgttcttccgatttgctttagtcccagaattttttttcccaaatatcttaaaaagtcactttctggttcagttcaatgaattgattgctacaaataatgcttttatagcgttatcctagctgtagttcagttaataggtaatacccctatagtttagtcaggagaagaacttatccgatttctgatctccatttttaattatatgaaatgaactgtagcataagcagtattcatttggattattttttttattagctctcaccccttcattattctgagctgaaagtctggcatgaactgtcctcaattttgttttcaaattcacatcgattatctatgcattatcctcttgtatctacctgtagaagtttctttttggttattccttgactgcttgattacagaaagaaatttatgaagctgtaatcgggatagttatactgcttgttcttatgattcatttcctttgtgcagttcttggtgtagcttgccactttcaccagcaaagttcatttaaatccttagggataggtaaacaatgtgtcatgcaatttcagatcatttagagtcatttcaaccttcatgttacactgacctagtccacaagtcacaaacatctaaaacaaacaagatacatgtgctcaagctaagaagaaggaatggtgaaagattgtccaacgaagcaaagaaaagggcaaagttaagtaaattgaagaaaataatgaagatgaagaatttgaagctctacgaagagaacaaaatcattattgaagagaatgaaaagttacgcaaaagagctcttcttcttcatcaagaaaacaaagacttattcactcaaattattcaacaaatttctcaaccctctaataatcacaattagcctcgagacgcgtgatatcattctcgcccatcacaagccccgatgattgagtaataatgtgtcacgcatcaccatgggtggcagtgtcagtgtgagcaatgacctgaatgaacaattgaaatgaaaagaaaaaaagtactccatctgttccaaattaaaattggttttaaccttttaataggtttatacaataattgatatatgttttctatatatgtctaatttgttatcatcc

SEQ ID NO: 936 - protein, 42 aa, Artificial sequence
  leucine zipper domain of SEQ ID NO: 747
KKIMKMKNLKLYEENKIIIEENEKLRKRALLLHQENKDLFTQ

SEQ ID NO: 937 - DNA, 2889 bp, Artificial sequence
  expression cassette pGOS2::ZPR::terminator
aatccgaaaagtttctgcaccgttttcaccccctaactaacaatatagggaacgtgtgctaaatataaaatgagaccttatatatgtagcgctgataactagaactatgcaagaaaaactcatccacctactttagtggcaatcgggctaaataaaaaagagtcgctacactagtttcgttttccttagtaattaagtgggaaaatgaaatcattattgcttagaatatacgttcacatctctgtcatgaagttaaattattcgaggtagccataattgtcatcaaactcttcttgaataaaaaaatctttctagctgaactcaatgggtaaagagagagattttttttaaaaaaatagaatgaagatattctgaacgtattggcaaagatttaaacatataattatataattttatagtttgtgcattcgtcatatcgcacatcattaaggacatgtcttactccatcccaatttttatttagtaattaaagacaattgacttatttttattatttatcttttttcgattagatgcaaggtacttacgcacacactttgtgctcatgtgcatgtgtgagtgcacctcctcaatacacgttcaactagcaacacatctctaatatcactcgcctatttaatacatttaggtagcaatatctgaattcaagcactccaccatcaccagaccacttttaataatatctaaaatacaaaaaataattttacagaatagcatgaaaagtatgaaacgaactatttaggtttttcacatacaaaaaaaaaaagaattttgctcgtgcgcgagcgccaatctcccatattgggcacacaggcaacaacagagtggctgcccacagaacaacccacaaaaaacgatgatctaacggaggacagcaagtccgcaacaaccttttaacagcaggctttgcggccaggagagaggaggagaggcaaagaaaaccaagcatcctccttctcccatctataaattcctccccccttttcccctctctatataggaggcatccaagccaagaagagggagagcaccaaggacacgcgactagcagaagccgagcgaccgccttctcgatccatatcttccggtcgagttcttggtcgatctcttccctcctccacctcctcctcacagggtatgtgcctcccttcggttgttcttggatttattgttctaggttgtgtagtacgggcgttgatgttaggaaaggggatctgtatctgtgatgattcctgttcttggatttgggatagaggggttcttgatgttgcatgttatcggttcggtttgattagtagtatggttttcaatcgtctggagagctctatggaaatgaaatggtttagggatcggaatcttgcgattttgtgagtaccttttgtttgaggtaaaatcagagcaccggtgattttgcttggtgtaataaagtacggttgtttggtcctcgattctggtagtgatgcttctcgatttgacgaagctatcctttgtttattccctattgaacaaaaataatccaactttgaagacggtcccgttgatgagattgaatgattgattcttaagcctgtccaaaatttcgcagctggcttgtttagatacagtagtccccatcacgaaattcatggaaacagttataatcctcaggaacaggggattccctgttcttccgatttgctttagtcccagaattttttttcccaaatatcttaaaaagtcactttctggttcagttcaatgaattgattgctacaaataatgcttttatagcgttatcctagctgtagttcagttaataggtaatacccctatagtttagtcaggagaagaacttatccgatttctgatctccatttttaattatatgaaatgaactgtagcataagcagtattcatttggattattttttttattagctctcaccccttcattattctgagctgaaagtctggcatgaactgtcctcaattttgttttcaaattcacatcgattatctatgcattatcctcttgtatctacctgtagaagtttctttttggttattccttgactgcttgattacagaaagaaatttatgaagctgtaatcgggatagttatactgcttgttcttatgattcatttcctttgtgcagttcttggtgtagcttgccactttcaccagcaaagttcatttaaatcaactagggatatcacaagtttgtacaaaaaagcaggcttaaacaatgtgtcatgcaatttcagatcatttagagtcatttcaaccttcatgttacactgacctagtccacaagtcacaaacatctaaaacaaacaagatacatgtgctcaagctaagaagaaggaatggtgaaagattgtccaacgaagcaaagaaaagggcaaagttaagtaaattgaagaaaataatgaagatgaagaatttgaagctctacgaagagaacaaaatcattattgaagagaatgaaaagttacgcaaaagagctcttcttcttcatcaagaaaacaaagacttattcactcaaattattcaacaaatttctcaaccctctaataatcacaattagacccagctttcttgtacaaagtggtgatatcacaagcccgggcggtcttctagggataacagggtaattatatccctctagatcacaagcccgggcggtcttctacgatgattgagtaataatgtgtcacgcatcaccatgggtggcagtgtcagtgtgagcaatgacctgaatgaacaattgaaatgaaaagaaaaaaagtactccatctgttccaaattaaaattggttttaaccttttaataggtttatacaataattgatatatgttttctgtatatgtctaatttgttatcatcc

SEQ ID NO: 938 - protein, 96 aa, Artificial sequence
  Domain consensus sequence for SM00360 (PT54_YEAST)
  misc_feature (8)..(8): Xaa is Asp or Glu
  misc_feature (14)..(14): Xaa is Asp or Glu
  misc_feature (23)..(27): Xaa is Asp or Glu
  misc_feature (43)..(56): Xaa is Asp or Glu
  misc_feature (63)..(64): Xaa is Asp or Glu
  misc_feature (70)..(70): Xaa is Asp or Glu
SVLVWNIXPTKLRXSHDILNYFXXXXXWFYNIRSSFKIYWDDXXXXXXXXXXXXXXEMKRNLXXRFISFXENSHDAYRFKRNYHGLLAKELLTLSE

SEQ ID NO: 939 - protein, 96 aa, Artificial sequence
  Domain consensus sequence for SM00360 (CONSENSUS/80%)
  MISC_FEATURE (1)..(92): Xaa at position 1, 5, 8, 10, 12-14, 19, 21, 23-27, 35-36, 43-56, 58, 62-64, 70, 73, 81 and 92 can be any naturally occurring amino acid
  MISC_FEATURE (2)..(95): Xaa at position 2, 6, 9, 17, 41, 61, 85 and 95 is Ala, Cys, Asp, Gly, Asn, Pro, Ser, Thr or Val
  MISC_FEATURE (3)..(94): Xaa at position 3, 7, 18, 22, 28-30, 32, 37-40, 65, 77, 79-80, 83, 86-88 and 93-94 is Ala, Cys, Phe, Gly, His, Ile, Lys, Leu, Met, Arg, Thr, Val, Trp or Tyr
  MISC_FEATURE (4)..(4): Xaa is Ile, Leu or Val
  MISC_FEATURE (11)..(90): Xaa at position 11, 33, 42, 57, 59-60, 71 and 89-90 is Ala, Cys, Asp, Glu, Gly, His, Lys, Asn, Gln, Arg, Ser or Thr
  MISC_FEATURE (15)..(96): Xaa at position 15, 20, 31, 34, 68, 72, 82, 84, 91 and 96 is Cys, Asp, Glu, His, Lys, Asn, Gln, Arg, Ser or Thr
  MISC_FEATURE (16)..(16): Xaa is Asp, Glu, His, Lys or Arg
  MISC_FEATURE (66)..(66): Xaa is Phe, His, Trp or Tyr
  MISC_FEATURE (67)..(67): Xaa is Ile, Leu or Val
  MISC_FEATURE (69)..(69): Xaa is Phe, His, Trp or Tyr
  MISC_FEATURE (74)..(74): Xaa is Asp, Glu, His, Lys or Arg
  MISC_FEATURE (75)..(75): Xaa is Asp or Glu
  MISC_FEATURE (76)..(76): Xaa is Ala, Gly or Ser
  MISC_FEATURE (78)..(78): Xaa is His, Lys or Arg
XXXXXXXXXXXXXXXXXXXXXXXXXXXXXXXXXXXXXXXXXXXXXXXXXXXXXXXXXXXXXXXXXXXXXXXXXXXXXXXXXXXXXXXXXXXXXXXX

SEQ ID NO: 940 - protein, 96 aa, Artificial sequence
  Domain consensus sequence for SM00360 (CONSENSUS/65%)
  MISC_FEATURE (1)..(92): Xaa at position 1, 3, 7, 13, 18, 22, 28, 30, 32, 35, 38-40, 77, 80-81, 83, 87-88 and 92 is Ala, Cys, Phe, Gly, His, Ile, Lys, Leu, Met, Arg, Thr, Val, Trp or Tyr
  MISC_FEATURE (2)..(93): Xaa at position 2, 4, 65, 67 and 93 is Ile, Leu or Val
  MISC_FEATURE (5)..(70): Xaa at position 5, 8, 12, 14, 19, 21, 24-27, 36, 43, 45-56, 63-64 and 70 can be any naturally occurring amino acid
  MISC_FEATURE (6)..(95): Xaa at position 6, 9-10, 17, 41, 57, 61, 79, 84, 89-90 and 95 is Ala, Cys, Asp, Gly, Asn, Pro, Ser, Thr or Val
  MISC_FEATURE (11)..(86): Xaa at position 11, 23, 33, 37, 44, 58-60, 62 and 86 is Ala, Cys, Asp, Glu, Gly, His, Lys, Asn, Gln, Arg, Ser or Thr
  MISC_FEATURE (15)..(96): Xaa at position 15, 20, 31, 42, 68, 71-73, 82, 94 and 96 is Cys, Asp, Glu, His, Lys, Asn, Gln, Arg, Ser or Thr
  MISC_FEATURE (16)..(16): Xaa is Asp or Glu
  MISC_FEATURE (29)..(29): Xaa is Phe, His, Trp or Tyr
  MISC_FEATURE (34)..(34): Xaa is Asp, Glu, His, Lys or Arg
  MISC_FEATURE (66)..(69): Xaa at position 66 and 69 is Phe, His, Trp or Tyr
  MISC_FEATURE (74)..(75): Xaa at position 74 and 75 is Asp or Glu
  MISC_FEATURE (78)..(78): Xaa is His, Lys or Arg
  MISC_FEATURE (91)..(91): Xaa is His, Lys or Arg
XXXXXXXXXXXXXXXXXXXXXXXXXXXXXXXXXXXXXXXXXXXXXXXXXXXXXXXXXXXXXXXXXXXXXXXXXXXAXXXXXXXXGXXXXXXXXXXX

SEQ ID NO: 941 - protein, 96 aa, Artificial sequence
  Domain consensus sequence for SM00360 (CONSENSUS/50%)
  MISC_FEATURE (1)..(93): Xaa at position 1, 3, 7, 18, 38, 65, 67, 80, 83 and 93 is Ile, Leu or Val
  MISC_FEATURE (5)..(96): Xaa at position 5-6, 9-10, 13, 17, 20, 23, 33, 35, 41, 44, 57, 60-61, 68, 73, 81-82, 84, 89, 92 and 96 is Ala, Cys, Asp, Gly, Asn, Pro, Ser, Thr or Val
  MISC_FEATURE (8)..(70): Xaa at position 8, 14, 24-26, 43, 45-56, 63-64 and 70 can be any naturally occurring amino acid
  MISC_FEATURE (11)..(72): Xaa at position 11, 27, 42 and 72 is Asp, Glu, His, Lys or Arg
  MISC_FEATURE (12)..(88): Xaa at position 12, 21-22, 32, 36, 39-40 and 87-88 is Ala, Cys, Phe, Gly, His, Ile, Lys, Leu, Met, Arg, Thr, Val, Trp or Tyr
  MISC_FEATURE (15)..(15): Xaa is Asp or Glu
  MISC_FEATURE (19)..(86): Xaa at position 19, 31, 58-59, 62, 71 and 86 is Cys, Asp, Glu, His, Lys, Asn, Gln, Arg, Ser or Thr
  MISC_FEATURE (28)..(29): Xaa at position 28 and 29 is Phe, His, Trp or Tyr
  MISC_FEATURE (34)..(34): Xaa is His, Lys or Arg
  MISC_FEATURE (77)..(77): Xaa is Ala, Cys, Asp, Glu, Gly, His, Lys, Asn, Gln, Arg, Ser or Thr
  MISC_FEATURE (78)..(78): Xaa is His, Lys or Arg
  MISC_FEATURE (94)..(94): Xaa is His, Lys or Arg
XVXVXXXXXXXXXXXEXXXXXXXXXXXXXGXXXXXXKXXXXXXXXXXXXXXXXXXXXXXXXXXXXYXXFXXXXEDAXXAXXXXXGXXXXGRXXXAX

SEQ ID NO: 942 - protein, 18 aa, Artificial sequence
  Domain consensus sequence for SM00343 (63|O46363/12-173)
  MISC_FEATURE (9)..(9): Xaa is Asp or Glu
TCYNCGQTXGHLSRECPS

SEQ ID NO: 943 - protein, 18 aa, Artificial sequence
  Domain consensus sequence for SM00343 (CONSENSUS/80%)
  MISC_FEATURE (1)..(17): Xaa at position 1, 8-9 and 17 can be any naturally occurring amino acid
  MISC_FEATURE (3)..(12): Xaa at position 3 or 12 is Ala, Cys, Phe, Gly, His, Ile, Lys, Leu, Met, Arg, Thr, Val, Trp or Tyr
  MISC_FEATURE (4)..(13): Xaa at position 4 or 13 is Ala, Cys, Asp, Glu, Gly, His, Lys, Asn, Gln, Arg, Ser or Thr
  MISC_FEATURE (6)..(6): Xaa is Ala, Cys, Asp, Gly, Asn, Pro, Ser, Thr or Val
  MISC_FEATURE (7)..(18): Xaa at position 7, 14-15 and 18 is Cys, Asp, Glu, His, Lys, Asn, Gln, Arg, Ser or Thr
XCXXCXXXXGHXXXXCXX

SEQ ID NO: 944 - protein, 18 aa, Artificial sequence
  Domain consensus sequence for SM00343 (CONSENSUS/65%)
  MISC_FEATURE (1)..(1): Xaa is Ala, Cys, Asp, Glu, Gly, His, Lys, Asn, Gln, Arg, Ser or Thr
  MISC_FEATURE (3)..(3): Xaa is Phe, His, Trp or Tyr
  MISC_FEATURE (4)..(18): Xaa at position 4, 7, 14 and 18 is Cys, Asp, Glu, His, Lys, Asn, Gln, Arg, Ser or Thr
  MISC_FEATURE (8)..(17): Xaa at position 8-9 and 17 can be any naturally occurring amino acid
  MISC_FEATURE (12)..(12): Xaa is Ala, Cys, Phe, Gly, His, Ile, Lys, Leu, Met, Arg, Thr, Val, Trp or Tyr
  MISC_FEATURE (13)..(13): Xaa is Ala, Gly or Ser
  MISC_FEATURE (15)..(15): Xaa is Asp, Glu, His, Lys or Arg
XCXXCGXXXGHXXXXCXX

SEQ ID NO: 945 - protein, 18 aa, Artificial sequence
  Domain consensus sequence for SM00343 (CONSENSUS/50%)
  MISC_FEATURE (1)..(18): Xaa at position 1, 8 and 17-18 is Ala, Cys, Asp, Gly, Asn, Pro, Ser, Thr or Val
  MISC_FEATURE (3)..(3): Xaa is Phe, His, Trp or Tyr
  MISC_FEATURE (4)..(4): Xaa is Cys, Asp, Glu, His, Lys, Asn, Gln, Arg, Ser or Thr
  MISC_FEATURE (7)..(7): Xaa is Asp, Glu, His, Lys or Arg
  MISC_FEATURE (9)..(9): Xaa can be any naturally occurring amino acid
  MISC_FEATURE (12)..(12): Xaa is Ala, Cys, Phe, Gly, His, Ile, Lys, Leu, Met, Arg, Thr, Val, Trp or Tyr
  MISC_FEATURE (13)..(13): Xaa is Ala, Gly or Ser
  MISC_FEATURE (14)..(14): Xaa is His, Lys or Arg
  MISC_FEATURE (15)..(15): Xaa is Asp or Glu
XCXXCGXXXGHXXXXCXX

SEQ ID NO: 946 - protein, 166 aa, Artificial sequence
  Consensus
  misc_feature (3)..(5): Xaa can be any naturally occurring amino acid
  misc_feature (7)..(40): Xaa can be any naturally occurring amino acid
  misc_feature (42)..(58): Xaa can be any naturally occurring amino acid
  misc_feature (62)..(63): Xaa can be any naturally occurring amino acid
  misc_feature (65)..(65): Xaa can be any naturally occurring amino acid
  misc_feature (70)..(120): Xaa can be any naturally occurring amino acid
  misc_feature (134)..(134): Xaa can be any naturally occurring amino acid
  misc_feature (155)..(155): Xaa can be any naturally occurring amino acid
  misc_feature (163)..(163): Xaa can be any naturally occurring amino acid
  misc_feature (165)..(165): Xaa can be any naturally occurring amino acid
MCXXXSXXXXXXXXXXXXXXXXXXXXXXXXXXXXXXXXXXLXXXXXXXXXXXXXXXXXVRVXXLXRRRRXXXXXXXXXXXXXXXXXXXXXXXXXXXXXXXXXXXXXXXXXXXXXXXXXXXEMEMKNLKLYMENXSIIEENEKLRKKALLLHQENXALLSQLQXKXS

We claim:

1. A method for enhancing a yield-related trait in a plant relative to a control plant, comprising modulating expression in a plant of a nucleic acid encoding a growth-related protein (GRP) or a Little-Zipper (ZPR) polypeptide, wherein:
(a) said growth-related protein (GRP) has at least 25% sequence identity to the amino acid sequence of SEQ ID NO: 251; or
(b) said ZPR polypeptide comprises a Leucine Zipper (ZIP) domain that is six heptads in length.

2. The method of claim 1, wherein:
(a) the growth-related protein has a motif having at least 70% sequence identity to motif 7 of SEQ ID NO: 742;
(b) the Leucine Zipper domain is located in the central to C-terminal region of said ZPR polypeptide;
(c) the ZPR polypeptide comprises one or more of the following motifs:
(i) Motif 8 of SEQ ID NO: 929;
(ii) Motif 9 of SEQ ID NO: 930; and
(iii) Motif 10 of SEQ ID NO: 931;
or
(d) the ZPR polypeptide comprises one or more of the following motifs:
(i) Motif 8 of SEQ ID NO: 929;
(ii) Motif 9 of SEQ ID NO: 930; and
(iii) Motif 10 of SEQ ID NO: 931;
and one or more of the following motifs:
(iv) Motif 11 of SEQ ID NO: 932;
(v) Motif 12 of SEQ ID NO: 933; and
(vi) Motif 13 of SEQ ID NO: 934.

3. The method of claim 1, wherein the modulated expression is effected by introducing and expressing in a plant a nucleic acid encoding said growth-related protein or said ZPR polypeptide.

4. The method of claim 1, wherein:
(a) the nucleic acid encoding a GRP encodes any one of the polypeptides listed in Table F or is a portion of such a nucleic acid, or a nucleic acid capable of hybridizing with such a nucleic acid;
(b) the nucleic acid encoding a GRP encodes an orthologue or paralogue of any of the polypeptides given in Table F;
(c) the nucleic acid encoding a ZPR polypeptide encodes any one of the polypeptides listed in Table J or is a portion of such a nucleic acid, or a nucleic acid capable of hybridizing with such a nucleic acid; or
(d) the nucleic acid sequence encoding a ZPR polypeptide encodes an orthologue or paralogue of any of the polypeptides given in Table J.

5. The method of claim 1, wherein:
(a) the nucleic acid encoding a GRP encodes a polypeptide comprising the amino acid sequence of SEQ ID NO: 251, or a homologue thereof; or
(b) the nucleic acid encoding a ZPR polypeptide encodes a polypeptide comprising the amino acid sequence of SEQ ID NO: 747, or a homologue thereof

6. The method of claim 1, wherein the yield-related trait comprises increased yield or increased seed yield relative to a control plant.

7. The method of claim 1, wherein the nucleic acid encodes a GRP, and wherein:
(a) the yield-related trait comprises increased harvest index, increased total seed weight, increased number of filled seeds, and/or increased thousand kernel weight relative to a control plant; or
(b) the yield-related trait comprises increased biomass or increased aboveground biomass relative to a control plant.

8. The method of claim 1, wherein the enhanced yield-related trait is obtained under non-stress conditions.

9. The method of claim 1, wherein the enhanced yield-related trait is obtained under conditions of drought stress, salt stress, or nitrogen deficiency.

10. The method of claim 3, wherein the nucleic acid is operably linked to a constitutive promoter, a medium strength constitutive promoter, a plant promoter, a GOS2 promoter, or a GOS2 promoter from rice.

11. A plant obtained by the method of claim 1, or a plant cell, plant part, seed, or progeny thereof, wherein said plant, or said plant cell, plant part, seed, or progeny thereof, comprises a recombinant nucleic acid encoding said GRP or said ZPR polypeptide.

12. A construct comprising:
(a) a nucleic acid encoding a GRP or a ZPR polypeptide as defined in claim 1;
(b) one or more heterologous control sequences capable of driving expression of the nucleic acid of (a); and optionally
(c) a transcription termination sequence.

13. The construct of claim 12, wherein one of the control sequences is a constitutive promoter, a medium strength constitutive promoter, a plant promoter, a GOS2 promoter, or a GOS2 promoter from rice

14. A method for making a plant having an enhanced yield-related trait relative to a control plant, comprising transforming the construct of claim 12 into a plant, plant cell, or plant part.

15. A plant, plant cell, or plant part comprising the construct of claim 12.

16. A method for the production of a transgenic plant having increased yield, increased biomass, and/or increased seed yield relative to a control plant, comprising:
(a) introducing and expressing in a plant a nucleic acid encoding a GRP or a ZPR polypeptide as defined in claim 1; and
(b) cultivating the plant under conditions promoting plant growth and development.

17. A transgenic plant having increased yield or increased seed yield relative to a control plant, resulting from modulated expression of a nucleic acid encoding a GRP or a ZPR polypeptide as defined in claim 1, or a transgenic plant cell derived from said transgenic plant.

18. The transgenic plant of claim 17, or a transgenic plant cell derived therefrom, wherein said plant is a crop plant, a monocot, or a cereal, or wherein said plant is beet, sugarbeet, alfalfa, sugarcane, rice, maize, wheat, barley, millet, rye, triticale, sorghum emmer, spelt, secale, einkorn, teff, milo, or oats.

19. Harvestable parts of the transgenic plant of claim 17, wherein said harvestable parts comprise a recombinant nucleic acid encoding said GRP or said ZPR polypeptide.

20. Products derived from the transgenic plant of claim 17 and/or from harvestable parts of said transgenic plant, wherein said products comprise a recombinant nucleic acid encoding said GRP or said ZPR polypeptide.
